(19) United States
(12) Patent Application Publication
(10) Pub. No.: US 2024/0287523 A1
(43) Pub. Date: Aug. 29, 2024

(54) TREATMENT OF MST1 RELATED DISEASES AND DISORDERS

(71) Applicant: Empirico Inc., San Diego, CA (US)

(72) Inventors: Omri GOTTESMAN, San Diego, CA (US); Shannon BRUSE, San Diego, CA (US); Paul BUSKE, Madison, WI (US); Brian CAJES, San Diego, CA (US); David JAKUBOSKY, San Diego, CA (US); Sarah KLEINSTEIN, San Diego, CA (US); David LEWIS, Madison, WI (US); David ROZEMA, Cross Plains, WI (US); John VEKICH, San Diego, CA (US)

(21) Appl. No.: 18/625,829

(22) Filed: Apr. 3, 2024

Related U.S. Application Data
(63) Continuation of application No. 18/567,342, filed on Dec. 5, 2023.
(60) Provisional application No. 63/211,364, filed on Jun. 16, 2021.

(51) Int. Cl. C12N 15/113; A61P 11/00

(52) U.S. Cl. CPC C12N 15/1136; A61P 11/00; C12N 2310/11; C12N 2310/14; C12N 2310/315; C12N 2310/321; C12N 2310/322; C12N 2310/3231; C12N 2310/351

(57) ABSTRACT

Disclosed herein are compositions comprising an oligonucleotide that targets MST1. The oligonucleotide may include a small interfering RNA (siRNA) or an antisense oligonucleotide (ASO). Also provided herein are methods of treating conditions associated with MST1 mutations that include providing an oligonucleotide that targets MST1 to a subject.

### CROSS-REFERENCE

[0001] This application is a continuation of U.S. national phase application Ser. No. 18/567,342, filed Dec. 5, 2023, which claims the benefit of International Application No. PCT/US2022/033344, filed Jun. 14, 2022, which claims the benefit of U.S. Provisional Application No. 63/211,364, filed Jun. 16, 2021, which are incorporated herein by reference in their entirety.

### SEQUENCE LISTING

[0002] The instant application contains a Sequence Listing which has been submitted electronically in XML format and is hereby incorporated by reference in its entirety. Said XML copy, created on Apr. 2, 2024, is named 54462-730_301_SL.xml and is 8,295,000 bytes in size.

### BACKGROUND

[0003] Lung disorders are a common problem, and may affect a wide variety of persons. Improved therapeutics are needed for treating these disorders.

### SUMMARY

[0004] Disclosed herein, in some embodiments, are compositions comprising an oligonucleotide that targets MST1. Disclosed herein, in some embodiments, are compositions comprising an oligonucleotide that targets MST1 and when administered to a subject in an effective amount increases a lung function measurement. In some embodiments, the lung function measurement comprises a forced expiratory volume in 1 second (FEV1) measurement, a forced expiratory volume in 1 second percent predicted (FEV1pp) measurement, a forced vital capacity (FVC) measurement, a FEV1/FVC ratio measurement, a forced expiratory volume, or a peak expiratory flow measurement. In some embodiments, the lung function measurement is increased by about 10% or more, as compared to prior to administration. Disclosed herein, in some embodiments, are compositions comprising an oligonucleotide that targets MST1 and when administered to a subject in an effective amount decreases a leukocyte measurement. In some embodiments, the leukocyte measurement comprises a lung leukocyte measurement. In some embodiments, the leukocyte measurement comprises a circulating leukocyte measurement. In some embodiments, the leukocyte measurement comprises a neutrophil measurement, eosinophil measurement, basophil measurement, monocyte measurement, or lymphocyte measurement, or a combination thereof. In some embodiments, the leukocyte measurement is decreased by about 10% or more, as compared to prior to administration. Disclosed herein, in some embodiments, are compositions comprising an oligonucleotide that targets MST1 and when administered to a subject in an effective amount decreases a chronic obstructive pulmonary disease (COPD) or asthma exacerbation measurement. In some embodiments, the COPD or asthma exacerbation measurement is decreased by about 10% or more, as compared to prior to administration. In some embodiments, the oligonucleotide comprises a modified internucleoside linkage. In some embodiments, the modified internucleoside linkage comprises alkylphosphonate, phosphorothioate, methylphosphonate, phosphorodithioate, alkylphosphonothioate, phosphoramidate, carbamate, carbonate, phosphate triester, acetamidate, or carboxymethyl ester, or a combination thereof. In some embodiments, the modified internucleoside linkage comprises one or more phosphorothioate linkages. In some embodiments, the oligonucleotide comprises 1, 2, 3, 4, 5, 6, 7, 8, 9, 10, 11, 12, 13, 14, 15, 16, 17, 18, 19, or 20 modified internucleoside linkages. In some embodiments, the oligonucleotide comprises a modified nucleoside. In some embodiments, the modified nucleoside comprises a locked nucleic acid (LNA), hexitol nucleic acid (HLA), cyclohexene nucleic acid (CeNA), 2′-methoxyethyl, 2′-O-alkyl, 2′-O-allyl, 2′-O-allyl, 2′-fluoro, or 2′-deoxy, or a combination thereof. In some embodiments, the modified nucleoside comprises a LNA. In some embodiments, the modified nucleoside comprises a 2′,4′ constrained ethyl nucleic acid. In some embodiments, the modified nucleoside comprises a 2′-O-methyl nucleoside, 2′-deoxyfluoro nucleoside, 2′-O—N-methylacetamido (2′-O-NMA) nucleoside, a 2′-O-dimethylaminoethoxyethyl (2′-O-DMAEOE) nucleoside, 2′-O-aminopropyl (2′-O-AP) nucleoside, or 2′-ara-F, or a combination thereof. In some embodiments, the modified nucleoside comprises one or more 2′fluoro modified nucleosides. In some embodiments, the modified nucleoside comprises a 2′ O-alkyl modified nucleoside. In some embodiments, the oligonucleotide comprises 1, 2, 3, 4, 5, 6, 7, 8, 9, 10, 11, 12, 13, 14, 15, 16, 17, 18, 19, 20, or 21 modified nucleosides. In some embodiments, the oligonucleotide comprises a lipid attached at a 3′ or 5′ terminus of the oligonucleotide. In some embodiments, the lipid comprises cholesterol, myristoyl, palmitoyl, stearoyl, lithocholoyl, docosanoyl, docosahexaenoyl, myristyl, palmityl stearyl, or α-tocopherol, or a combination thereof. In some embodiments, the oligonucleotide comprises a sugar moiety attached at a 3′ or 5′ terminus of the oligonucleotide. In some embodiments, the sugar comprises N-acetylgalactosamine (GalNAc), N-acetylglucosamine (GlcNAc), or mannose. In some embodiments, the oligonucleotide comprises an integrin targeting ligand attached at a 3′ or 5′ terminus of the oligonucleotide. In some embodiments, the integrin comprises integrin alpha-v-beta-6. In some embodiments, the integrin targeting ligand comprises an arginine-glycine-aspartic acid (RGD) peptide. In some embodiments, the oligonucleotide comprises a small interfering RNA (siRNA) comprising a sense strand and an antisense strand. In some embodiments, the sense strand is 12-30 nucleosides in length. In some embodiments, the antisense strand is 12-30 nucleosides in length. Disclosed herein, in some embodiments, are compositions comprising an oligonucleotide that inhibits the expression of MST1, wherein the oligonucleotide comprises an siRNA comprising a sense strand and an antisense strand, each strand is independently about 12-30 nucleosides in length, and at least one of the sense strand and the antisense strand comprises a nucleoside sequence comprising about 12-30 contiguous nucleosides of SEQ ID NO: 6185. In some embodiments, any one of the following is true with regard to the sense strand: (i) all purines comprise 2′ fluoro modified purines, and all pyrimidines comprise a mixture of 2′ fluoro and 2′ methyl modified pyrimidines; (ii) all purines comprise 2′ methyl modified purines, and all pyrimidines comprise a mixture of 2′ fluoro and 2′ methyl modified pyrimidines; (iii) all purines comprise 2′ fluoro modified purines, and all pyrimidines comprise 2′ methyl modified pyrimidines; (iv) all pyrimidines comprise 2′ fluoro modified pyrimidines, and all purines comprise a mixture of 2′ fluoro and 2′ methyl modified purines; (v) all pyrimidines comprise 2′ methyl modified pyrimidines, and all purines comprise a mixture of 2′ fluoro and 2′ methyl modified purines; or (vi) all pyrimidines comprise 2′ fluoro modified pyrimidines, and all purines comprise 2′ methyl modified purines. In some embodiments, the sense strand comprises any one of modification patterns 1S, 2S, 3S, 4S, 5S, 6S, 7S, 8S, 9S, 10S, 11S, 12S, 13S, 14S, 15S, 16S, 17S, 18S, 19S, 20S, 21S, 22S, 23S, 24S, 25S, 26S, 27S, 28S, 29S, 30S, 31S, 32S, 33S, 24S, or 35S. In some embodiments, any one of the following is true with regard to the antisense strand: (i) all purines comprise 2′ fluoro modified purines, and all pyrimidines comprise a mixture of 2′ fluoro and 2′ methyl modified pyrimidines; (ii) all purines comprise 2′ methyl modified purines, and all pyrimidines comprise a mixture of 2′ fluoro and 2′ methyl modified pyrimidines; (iii) all purines comprise 2′ methyl modified purines, and all pyrimidines comprise 2′ fluoro modified pyrimidines; (iv) all pyrimidines comprise 2′ fluoro modified pyrimidines, and all purines comprise a mixture of 2′ fluoro and 2′ methyl modified purines; (v) all pyrimidines comprise 2′ methyl modified pyrimidines, and all purines comprise a mixture of 2′ fluoro and 2′ methyl modified purines; or (vi) all pyrimidines comprise 2′ methyl modified pyrimidines, and all purines comprise 2′ fluoro modified purines. In some embodiments, the antisense strand comprises any one of modification patterns 1AS, 2AS, 3AS, 4AS, 5AS, 6AS, 7AS, 8AS, 9AS, 10AS, 11AS, 12AS, 13AS, 14AS, 15AS, 16AS, 17AS, 19AS, 20AS, or 21AS. In some embodiments, the sense strand comprises the nucleic acid sequence of any one of SEQ ID NOs: 1-3024 or 6358-6387, and the antisense strand comprises the nucleic acid sequence of any one of SEQ ID NOs: 3025-6048 or 6388-6417. In some embodiments, the sense strand comprises the nucleic acid sequence of any one of SEQ ID NOs 6373, 6375, 6385, 6386, or 6387, and the antisense strand comprises the nucleic acid sequence of any one of SEQ ID NOs: 6403, 6405, 6415, 6416, or 6417. In some embodiments, the oligonucleotide comprises an antisense oligonucleotide (ASO). In some embodiments, the ASO is 12-30 nucleosides in length. Disclosed herein, in some embodiments, are compositions comprising an oligonucleotide that inhibits the expression of MST1, wherein the oligonucleotide comprises an ASO about 12-30 nucleosides in length and a nucleoside sequence complementary to about 12-30 contiguous nucleosides of SEQ ID NO: 6185. Some embodiments include a pharmaceutically acceptable carrier. Some embodiments include a method of treating a subject having a lung disorder, comprising administering an effective amount of the composition to the subject. In some embodiments, the lung disorder comprises COPD, acute exacerbation of COPD, emphysema, chronic bronchitis, asthma, status asthmaticus, asthma-COPD overlap syndrome (ACOS), cough, lung cancer, interstitial lung disease, or pulmonary fibrosis.

### BRIEF DESCRIPTION OF THE DRAWINGS

[0005] The novel features of the invention are set forth with particularity in the appended claims. A better understanding of the features and advantages of the present invention will be obtained by reference to the following detailed description that sets forth illustrative embodiments, in which the principles of the invention are utilized, and the accompanying drawings of which:

[0006] FIG. 1 shows a western blot for MST1 protein.

### DETAILED DESCRIPTION

[0007] Large-scale human genetic data can improve the success rate of pharmaceutical discovery and development. A Genome Wide Association Study (GWAS) may detect associations between genetic variants and traits in a population sample. A GWAS may enable better understanding of the biology of disease, and provide applicable treatments. A GWAS can utilize genotyping and/or sequencing data, and often involves an evaluation of millions of genetic variants that are relatively evenly distributed across the genome. The most common GWAS design is the case-control study, which involves comparing variant frequencies in cases versus controls. If a variant has a significantly different frequency in cases versus controls, that variant is said to be associated with disease. Association statistics that may be used in a GWAS are p-values, as a measure of statistical significance; odds ratios (OR), as a measure of effect size; or beta coefficients (beta), as a measure of effect size. Researchers often assume an additive genetic model and calculate an allelic odds ratio, which is the increased (or decreased) risk of disease conferred by each additional copy of an allele (compared to carrying no copies of that allele). An additional concept in design and interpretation of GWAS is that of linkage disequilibrium, which is the non-random association of alleles. The presence of linkage disequilibrium can obfuscate which variant is “causal.”

[0008] Functional annotation of variants and/or wet lab experimentation can identify the causal genetic variant identified via GWAS, and in many cases may lead to the identification of disease-causing genes. In particular, understanding the functional effect of a causal genetic variant (for example, loss of protein function, gain of protein function, increase in gene expression, or decrease in gene expression) may allow that variant to be used as a proxy for therapeutic modulation of the target gene, or to gain insight into potential therapeutic efficacy and safety of a therapeutic that modulates that target.

[0009] Identification of such gene-disease associations has provided insights into disease biology and may be used to identify novel therapeutic targets for the pharmaceutical industry. In order to translate the therapeutic insights derived from human genetics, disease biology in patients may be exogenously ‘programmed’ into replicating the observation from human genetics. There are several potential options for therapeutic modalities that may be brought to bear in translating therapeutic targets identified via human genetics into novel medicines. These may include well established therapeutic modalities such as small molecules and monoclonal antibodies, maturing modalities such as oligonucleotides, and emerging modalities such as gene therapy and gene editing. The choice of therapeutic modality can depend on several factors including the location of a target (for example, intracellular, extracellular, or secreted), a relevant tissue (for example, lung or liver) and a relevant indication.

[0010] The MST1 (macrophage-stimulating 1) gene is located on chromosome 3, and encodes macrophage-stimulating protein (MSP), also known as hepatocyte growth factor-like protein (HLP, HGFL, or HGFLP). MSP may also be referred to as an MST1 protein. The MST1 gene may encode various transcripts or splice variants. MSP may include 711 amino acids and have a mass of about 80.3 kDa. MSP may be cleaved into an alpha and beta chain. MSP may be cytoplasmic. MSP may be secreted. MSP may interact with the macrophage-stimulating protein receptor, encoded by MST1R (macrophage-stimulating 1 receptor). MST1 may be expressed in liver cells such as hepatocytes. Secreted MSP may bind or interact with macrophage-stimulating protein receptor in the lungs. MSP may stimulate lung ciliary motility. MST1 may be expressed in lung cells. An example of an MSP amino acid sequence, and further description of MSP is included at uniprot.org under accession no. P26927 (last modified May 15, 2007).

[0011] Here, it is shown that genetic variants that may result in loss of function of the MST1 gene in humans are associated with decreased risk of chronic obstructive pulmonary disease (COPD), family history of COPD, asthma, and use of inhaled beta agonist medication. Therefore, inhibition of MST1 or MSP may serve as a therapeutic strategy for treatment of a lung disorder such as COPD, acute exacerbation of COPD, emphysema, chronic bronchitis, asthma, status asthmaticus, asthma-COPD overlap syndrome (ACOS), cough, lung cancer, interstitial lung disease, or pulmonary fibrosis.

[0012] Disclosed herein, are methods or compositions that inhibit or target MST1 or MSP. Where inhibition or targeting of MST1 is disclosed, it is contemplated that some embodiments may include inhibiting or targeting MSP, or vice versa. For example, by inhibiting or targeting an RNA (e.g. mRNA) encoded by the MST1 gene using an oligonucleotide described herein, MSP may be inhibited or targeted as a result of there being less production of MSP by translation of the MST1 RNA; or MSP may be targeted or inhibited by an oligonucleotide that binds or interacts with an MST1 RNA and reduces production of MSP from the MST1 RNA. Thus, targeting MST1 may refer to binding an MST1 RNA and reducing MST1 RNA levels or MSP levels. The oligonucleotide may include a small interfering RNA (siRNA) or an antisense oligonucleotide (ASO). Also provided herein are methods of treating a lung disorder by providing an oligonucleotide that targets MST1 to a subject in need thereof.

### I. Compositions

[0013] Disclosed herein, in some embodiments, are compositions comprising an oligonucleotide. In some embodiments, the composition comprises an oligonucleotide that targets MST1. In some embodiments, the composition consists of an oligonucleotide that targets MST1. In some embodiments, the oligonucleotide reduces MST1 mRNA expression in the subject. In some embodiments, the oligonucleotide reduces MSP expression in the subject. The oligonucleotide may include a small interfering RNA (siRNA) described herein. The oligonucleotide may include an antisense oligonucleotide (ASO) described herein. In some embodiments, a composition described herein is used in a method of treating a disorder in a subject in need thereof. Some embodiments relate to a composition comprising an oligonucleotide for use in a method of treating a disorder as described herein. Some embodiments relate to use of a composition comprising an oligonucleotide, in a method of treating a disorder as described herein.

[0014] Some embodiments include a composition comprising an oligonucleotide that targets MST1 and when administered to a subject in an effective amount decreases MST1 mRNA or MSP levels in a cell, fluid or tissue. In some embodiments, the composition comprises an oligonucleotide that targets MST1 and when administered to a subject in an effective amount decreases MST1 mRNA levels in a cell or tissue. In some embodiments, the cell is a liver cell or hepatocyte. In some embodiments, the cell is a lung cell, lung epithelial cell, type I or II alveolar cell, macrophage, alveolar macrophage, goblet cell, club cell, or fibroblast. In some embodiments, the tissue is liver tissue. In some embodiments, the tissue is lung tissue. In some embodiments, the MST1 mRNA levels are decreased by about 2.5% or more, about 5% or more, or about 7.5% or more, as compared to prior to administration. In some embodiments, the MST1 mRNA levels are decreased by about 10% or more, as compared to prior to administration. In some embodiments, the MST1 mRNA levels are decreased by about 20% or more, about 30% or more, about 40% or more, about 50% or more, about 60% or more, about 70% or more, about 80% or more, about 90% or more, or about 100%, as compared to prior to administration. In some embodiments, the MST1 mRNA levels are decreased by no more than about 2.5%, no more than about 5%, or no more than about 7.5%, as compared to prior to administration. In some embodiments, the MST1 mRNA levels are decreased by no more than about 10%, as compared to prior to administration. In some embodiments, the MST1 mRNA levels are decreased by no more than about 20%, no more than about 30%, no more than about 40%, no more than about 50%, no more than about 60%, no more than about 70%, no more than about 80%, or no more than about 90%, as compared to prior to administration. In some embodiments, the MST1 mRNA levels are decreased by 2.5%, 5%, 7.5%, 10%, 15%, 20%, 25%, 30%, 35%, 40%, 45%, 50%, 55%, 60%, 65%, 70%, 75%, 80%, 85%, 90%, 95%, or 100%, or by a range defined by any of the two aforementioned percentages.

[0015] In some embodiments, the composition comprises an oligonucleotide that targets MST1 and when administered to a subject in an effective amount decreases MSP levels in a cell, fluid or tissue. In some embodiments, the cell is a liver cell or hepatocyte. In some embodiments, the cell is a lung cell, lung epithelial cell, type I or II alveolar cell, macrophage, alveolar macrophage, goblet cell, club cell, or fibroblast. In some embodiments, the tissue is liver tissue. In some embodiments, the tissue is lung tissue. In some embodiments, the fluid is a blood, serum, or plasma sample. In some embodiments, the fluid is a lung fluid such as a bronchoalveolar fluid. In some embodiments, the MSP levels are decreased by about 2.5% or more, about 5% or more, or about 7.5% or more, as compared to prior to administration. In some embodiments, the MSP levels are decreased by about 10% or more, as compared to prior to administration. In some embodiments, the MSP levels are decreased by about 20% or more, about 30% or more, about 40% or more, about 50% or more, about 60% or more, about 70% or more, about 80% or more, about 90% or more, or about 100%, as compared to prior to administration. In some embodiments, the MSP levels are decreased by no more than about 2.5%, no more than about 5%, or no more than about 7.5%, as compared to prior to administration. In some embodiments, the MSP levels are decreased by no more than about 10%, as compared to prior to administration. In some embodiments, the MSP levels are decreased by no more than about 20%, no more than about 30%, no more than about 40%, no more than about 50%, no more than about 60%, no more than about 70%, no more than about 80%, or no more than about 90%, as compared to prior to administration. In some embodiments, the MSP levels are decreased by 2.5%, 5%, 7.5%, 10%, 15%, 20%, 25%, 30%, 35%, 40%, 45%, 50%, 55%, 60%, 65%, 70%, 75%, 80%, 85%, 90%, 95%, or 100%, or by a range defined by any of the two aforementioned percentages.

[0016] In some embodiments, the composition comprises an oligonucleotide that targets MST1 and when administered to a subject in an effective amount diminishes an adverse phenotype of lung disorder in the subject. The lung disorder may include chronic obstructive pulmonary disease (COPD), acute exacerbation of COPD, emphysema, chronic bronchitis, asthma, status asthmaticus, asthma-COPD overlap syndrome (ACOS), cough, lung cancer, interstitial lung disease, or pulmonary fibrosis. In some embodiments, the adverse phenotype is decreased by about 2.5% or more, about 5% or more, or about 7.5% or more, as compared to prior to administration. In some embodiments, the adverse phenotype is decreased by about 10% or more, as compared to prior to administration. In some embodiments, the adverse phenotype is decreased by about 20% or more, about 30% or more, about 40% or more, about 50% or more, about 60% or more, about 70% or more, about 80% or more, about 90% or more, or about 100%, as compared to prior to administration. In some embodiments, the adverse phenotype is decreased by no more than about 2.5%, no more than about 5%, or no more than about 7.5%, as compared to prior to administration. In some embodiments, the adverse phenotype is decreased by no more than about 10%, as compared to prior to administration. In some embodiments, the adverse phenotype is decreased by no more than about 20%, no more than about 30%, no more than about 40%, no more than about 50%, no more than about 60%, no more than about 70%, no more than about 80%, or no more than about 90%, as compared to prior to administration. In some embodiments, the adverse phenotype is decreased by 2.5%, 5%, 7.5%, 10%, 15%, 20%, 25%, 30%, 35%, 40%, 45%, 50%, 55%, 60%, 65%, 70%, 75%, 80%, 85%, 90%, 95%, or 100%, or by a range defined by any of the two aforementioned percentages.

[0017] In some embodiments, the composition comprises an oligonucleotide that targets MST1 and when administered to a subject in an effective amount enhances a protective phenotype of a lung disorder. The lung disorder may include chronic obstructive pulmonary disease (COPD), acute exacerbation of COPD, emphysema, chronic bronchitis, asthma, status asthmaticus, asthma-COPD overlap syndrome (ACOS), cough, lung cancer, interstitial lung disease, or pulmonary fibrosis. In some embodiments, the protective phenotype is increased by about 2.5% or more, about 5% or more, or about 7.5% or more, as compared to prior to administration. In some embodiments, the protective phenotype is increased by about 10% or more, as compared to prior to administration. In some embodiments, the protective phenotype is increased by about 20% or more, about 30% or more, about 40% or more, about 50% or more, about 60% or more, about 70% or more, about 80% or more, about 90% or more, or about 100% or more, as compared to prior to administration. In some embodiments, the protective phenotype is increased by about 200% or more, about 300% or more, about 400% or more, about 500% or more, about 600% or more, about 700% or more, about 800% or more, about 900% or more, or about 1000% or more, as compared to prior to administration. In some embodiments, the protective phenotype is increased by no more than about 2.5%, no more than about 5%, or no more than about 7.5%, as compared to prior to administration. In some embodiments, the protective phenotype is increased by no more than about 10%, as compared to prior to administration. In some embodiments, the protective phenotype is increased by no more than about 20%, no more than about 30%, no more than about 40%, no more than about 50%, no more than about 60%, no more than about 70%, no more than about 80%, no more than about 90%, or no more than about 100%, as compared to prior to administration. In some embodiments, the protective phenotype is increased by no more than about 200%, no more than about 300%, no more than about 400%, no more than about 500%, no more than about 600%, no more than about 700%, no more than about 800%, no more than about 900%, or no more than about 1000%, as compared to prior to administration. In some embodiments, the protective phenotype is increased by 2.5%, 5%, 7.5%, 10%, 15%, 20%, 25%, 30%, 35%, 40%, 45%, 50%, 55%, 60%, 65%, 70%, 75%, 80%, 85%, 90%, 95%, 100%, 150%, 200%, 250%, 300%, 400%, 500%, 600%, 700%, 800%, 900%, or 1000%, or by a range defined by any of the two aforementioned percentages.

[0018] In some embodiments, the composition comprises an oligonucleotide that targets MST1 and when administered to a subject in an effective amount improves (e.g. increases) a lung function measurement. The lung function measurement may include a measurement of forced expiratory volume in 1 second (FEV1), forced expiratory volume in 1 second percent predicted (FEV1pp), forced vital capacity (FVC), FEV1/FVC ratio, forced expiratory volume, or peak expiratory flow. In some embodiments, the lung function measurement is improved by about 2.5% or more, about 5% or more, or about 7.5% or more, as compared to prior to administration. In some embodiments, the lung function measurement is improved by about 10% or more, as compared to prior to administration. In some embodiments, the lung function measurement is improved by about 20% or more, about 30% or more, about 40% or more, about 50% or more, about 60% or more, about 70% or more, about 80% or more, about 90% or more, or about 100% or more, as compared to prior to administration. In some embodiments, the lung function measurement is improved by about 200% or more, about 300% or more, about 400% or more, about 500% or more, about 600% or more, about 700% or more, about 800% or more, about 900% or more, or about 1000% or more, as compared to prior to administration. In some embodiments, the lung function measurement is improved by no more than about 2.5%, no more than about 5%, or no more than about 7.5%, as compared to prior to administration. In some embodiments, the lung function measurement is improved by no more than about 10%, as compared to prior to administration. In some embodiments, the lung function measurement is improved by no more than about 20%, no more than about 30%, no more than about 40%, no more than about 50%, no more than about 60%, no more than about 70%, no more than about 80%, no more than about 90%, or no more than about 100%, as compared to prior to administration. In some embodiments, the lung function measurement is improved by no more than about 200%, no more than about 300%, no more than about 400%, no more than about 500%, no more than about 600%, no more than about 700%, no more than about 800%, no more than about 900%, or no more than about 1000%, as compared to prior to administration. In some embodiments, the lung function measurement is improved by 2.5%, 5%, 7.5%, 10%, 15%, 20%, 25%, 30%, 35%, 40%, 45%, 50%, 55%, 60%, 65%, 70%, 75%, 80%, 85%, 90%, 95%, 100%, 150%, 200%, 250%, 300%, 400%, 500%, 600%, 700%, 800%, 900%, or 1000%, or by a range defined by any of the two aforementioned percentages.

[0019] A leukocyte measurement may be affected by a lung disorder. For example, some inflammatory lung disorders that may include chronic obstructive pulmonary disease (COPD) or asthma may lead to increased inflammation and circulating white blood cell counts that may be treated using a composition comprising an oligonucleotide; or lung inflammation concomitant with a lung disorder may include an increase in leukocytes in a lung tissue or lung fluid (e.g. bronchoalveolar fluid). In some embodiments, the composition comprises an oligonucleotide that targets MST1 and when administered to a subject in an effective amount changes a leukocyte measurement in a cell, fluid or tissue of the subject. In some embodiments, the cell is a liver cell or hepatocyte. In some embodiments, the cell is a lung cell, lung epithelial cell, type I or II alveolar cell, macrophage, alveolar macrophage, goblet cell, club cell, or fibroblast. In some embodiments, the tissue is liver tissue. In some embodiments, the tissue is lung tissue. In some embodiments, the fluid is a blood, serum, or plasma sample. In some embodiments, the fluid is a lung fluid such as a bronchoalveolar fluid. The change may be a decrease (for example, when circulating levels of leukocytes, or levels of leukocytes in lungs are increased due to an inflammatory lung disorder). The change may be an increase in some embodiments. In some embodiments, the leukocyte measurement is changed by about 2.5% or more, about 5% or more, or about 7.5% or more, as compared to prior to administration. In some embodiments, the leukocyte measurement is changed by about 10% or more, as compared to prior to administration. In some embodiments, the leukocyte measurement is changed by about 20% or more, about 30% or more, about 40% or more, about 50% or more, about 60% or more, about 70% or more, or about 80% or more, as compared to prior to administration. In some embodiments, the leukocyte measurement is changed by no more than about 2.5%, no more than about 5%, or no more than about 7.5%, as compared to prior to administration. In some embodiments, the leukocyte measurement is changed by no more than about 10%, as compared to prior to administration. In some embodiments, the leukocyte measurement is changed by no more than about 20%, no more than about 30%, no more than about 40%, no more than about 50%, no more than about 60%, no more than about 70%, no more than about 80%, or no more than about 90%, as compared to prior to administration. In some embodiments, the leukocyte measurement is changed by 2.5%, 5%, 7.5%, 10%, 15%, 20%, 25%, 30%, 35%, 40%, 45%, 50%, 55%, 60%, 65%, 70%, 75%, 80%, 85%, or 90%, or by a range defined by any of the two aforementioned percentages.

[0020] In some embodiments, the composition comprises an oligonucleotide that targets MST1 and when administered to a subject in an effective amount decreases chronic obstructive pulmonary disease (COPD) exacerbations in the subject. In some embodiments, the COPD exacerbations are decreased by about 2.5% or more, about 5% or more, or about 7.5% or more, as compared to prior to administration. In some embodiments, the COPD exacerbations are decreased by about 10% or more, as compared to prior to administration. In some embodiments, the COPD exacerbations are decreased by about 20% or more, about 30% or more, about 40% or more, about 50% or more, about 60% or more, about 70% or more, about 80% or more, about 90% or more, or about 100%, as compared to prior to administration. In some embodiments, the COPD exacerbations are decreased by no more than about 2.5%, no more than about 5%, or no more than about 7.5%, as compared to prior to administration. In some embodiments, the COPD exacerbations are decreased by no more than about 10%, as compared to prior to administration. In some embodiments, the COPD exacerbations are decreased by no more than about 20%, no more than about 30%, no more than about 40%, no more than about 50%, no more than about 60%, no more than about 70%, no more than about 80%, or no more than about 90%, as compared to prior to administration. In some embodiments, the COPD exacerbations are decreased by 2.5%, 5%, 7.5%, 10%, 15%, 20%, 25%, 30%, 35%, 40%, 45%, 50%, 55%, 60%, 65%, 70%, 75%, 80%, 85%, 90%, 95%, or 100%, or by a range defined by any of the two aforementioned percentages.

[0021] In some embodiments, the composition comprises an oligonucleotide that targets MST1 and when administered to a subject in an effective amount decreases asthma exacerbations in the subject. In some embodiments, the asthma exacerbations are decreased by about 2.5% or more, about 5% or more, or about 7.5% or more, as compared to prior to administration. In some embodiments, the asthma exacerbations are decreased by about 10% or more, as compared to prior to administration. In some embodiments, the asthma exacerbations are decreased by about 20% or more, about 30% or more, about 40% or more, about 50% or more, about 60% or more, about 70% or more, about 80% or more, about 90% or more, or about 100%, as compared to prior to administration. In some embodiments, the asthma exacerbations are decreased by no more than about 2.5%, no more than about 5%, or no more than about 7.5%, as compared to prior to administration. In some embodiments, the asthma exacerbations are decreased by no more than about 10%, as compared to prior to administration. In some embodiments, the asthma exacerbations are decreased by no more than about 20%, no more than about 30%, no more than about 40%, no more than about 50%, no more than about 60%, no more than about 70%, no more than about 80%, or no more than about 90%, as compared to prior to administration. In some embodiments, the asthma exacerbations are decreased by 2.5%, 5%, 7.5%, 10%, 15%, 20%, 25%, 30%, 35%, 40%, 45%, 50%, 55%, 60%, 65%, 70%, 75%, 80%, 85%, 90%, 95%, or 100%, or by a range defined by any of the two aforementioned percentages.

A. siRNAs

[0022] In some embodiments, the composition comprises an oligonucleotide that targets MST1, wherein the oligonucleotide comprises a small interfering RNA (siRNA). In some embodiments, the composition comprises an oligonucleotide that targets MST1, wherein the oligonucleotide comprises a small interfering RNA (siRNA) comprising a sense strand and an antisense strand.

[0023] In some embodiments, the composition comprises an oligonucleotide that inhibits the expression of MST1, wherein the oligonucleotide comprises an siRNA comprising a sense strand and an antisense strand, wherein the sense strand is 12-30 nucleosides in length. In some embodiments, the composition comprises a sense stran that is 10, 11, 12, 13, 14, 15, 16, 17, 18, 19, 20, 21, 22, 23, 24, 25, 26, 27, 28, 29, or 30 nucleosides in length, or a range defined by any of the two aforementioned numbers. The sense strand may be 14-30 nucleosides in length. In some embodiments, the composition comprises an antisense strand is 12-30 nucleosides in length. In some embodiments, the composition comprises an antisense strand that is 10, 11, 12, 13, 14, 15, 16, 17, 18, 19, 20, 21, 22, 23, 24, 25, 26, 27, 28, 29, or 30 nucleosides in length, or a range defined by any of the two aforementioned numbers. The antisense strand may be 14-30 nucleosides in length.

[0024] In some embodiments, the composition comprises an oligonucleotide that inhibits the expression of MST1, wherein the oligonucleotide comprises an siRNA comprising a sense strand and an antisense strand, each strand is independently about 12-30 nucleosides in length, and at least one of the sense strand and the antisense strand comprises a nucleoside sequence comprising about 12-30 contiguous nucleosides of a full-length human MST1 mRNA sequence such as SEQ ID NO: 6163. In some embodiments, at least one of the sense strand and the antisense strand comprise a nucleoside sequence comprising at least about 10, 11, 12, 13, 14, 15, 16, 17, 18, 19, 20, 21, 22, 23, 24, 25, 26, 27, 28, 29, 30, or more contiguous nucleosides of one of SEQ ID NO: 6163.

[0025] In some embodiments, the composition comprises an oligonucleotide that inhibits the expression of MST1, wherein the oligonucleotide comprises an siRNA comprising a sense strand and an antisense strand, each strand is independently about 12-30 nucleosides in length, and at least one of the sense strand and the antisense strand comprises a nucleoside sequence comprising about 12-30 contiguous nucleosides of a full-length human MST1 mRNA sequence such as SEQ ID NO: 6185. In some embodiments, at least one of the sense strand and the antisense strand comprise a nucleoside sequence comprising at least about 10, 11, 12, 13, 14, 15, 16, 17, 18, 19, 20, 21, 22, 23, 24, 25, 26, 27, 28, 29, 30, or more contiguous nucleosides of one of SEQ ID NO: 6185.

[0026] In some embodiments, the composition comprises an oligonucleotide that inhibits the expression of MST1, wherein the oligonucleotide comprises an siRNA comprising a sense strand and an antisense strand, wherein the sense strand and the antisense strand form a double-stranded RNA duplex. In some embodiments, the first base pair of the double-stranded RNA duplex is an AU base pair.

[0027] In some embodiments, the sense strand further comprises a 3′ overhang. In some embodiments, the 3′ overhang comprises 1, 2, 3, 4, 5, 6, 7, 8, 9, or 10 nucleosides, or a range of nucleotides defined by any two of the aforementioned numbers. In some embodiments, the 3′ overhang comprises 1, 2, or more nucleosides. In some embodiments, the 3′ overhang comprises 2 nucleosides. In some embodiments, the sense strand further comprises a 5′ overhang. In some embodiments, the 5′ overhang comprises 1, 2, 3, 4, 5, 6, 7, 8, 9, or 10 nucleosides, or a range of nucleotides defined by any two of the aforementioned numbers. In some embodiments, the 5′ overhang comprises 1, 2, or more nucleosides. In some embodiments, the 5′ overhang comprises 2 nucleosides.

[0028] In some embodiments, the antisense strand further comprises a 3′ overhang. In some embodiments, the 3′ overhang comprises 1, 2, 3, 4, 5, 6, 7, 8, 9, or 10 nucleosides, or a range of nucleotides defined by any two of the aforementioned numbers. In some embodiments, the 3′ overhang comprises 1, 2, or more nucleosides. In some embodiments, the 3′ overhang comprises 2 nucleosides. In some embodiments, the antisense strand further comprises a 5′ overhang. In some embodiments, the 5′ overhang comprises 1, 2, 3, 4, 5, 6, 7, 8, 9, or 10 nucleosides, or a range of nucleotides defined by any two of the aforementioned numbers. In some embodiments, the 5′ overhang comprises 1, 2, or more nucleosides. In some embodiments, the 5′ overhang comprises 2 nucleosides.

[0029] In some embodiments, the composition comprises an oligonucleotide that inhibits the expression of MST1, wherein the oligonucleotide comprises an siRNA comprising a sense strand and an antisense strand, wherein the siRNA binds with a 19mer in a human MST1 mRNA. In some embodiments, the siRNA binds with a 12mer, a 13mer, a 14mer, a 15mer, a 16mer, a 17mer, a 18mer, a 19mer, a 20mer, a 21mer, a 22mer, a 23mer, a 24mer, or a 25mer in a human MST1 mRNA.

[0030] In some embodiments, the composition comprises an oligonucleotide that inhibits the expression of MST1, wherein the oligonucleotide comprises an siRNA comprising a sense strand and an antisense strand, wherein the siRNA binds with a 17mer in a non-human primate MST1 mRNA. In some embodiments, the siRNA binds with a 12mer, a 13mer, a 14mer, a 15mer, a 16mer, a 17mer, a 18mer, a 19mer, a 20mer, a 21mer, a 22mer, a 23mer, a 24mer, or a 25mer in a non-human primate MST1 mRNA.

[0031] In some embodiments, the composition comprises an oligonucleotide that inhibits the expression of MST1, wherein the oligonucleotide comprises an siRNA comprising a sense strand and an antisense strand, wherein the siRNA binds with a human MST1 mRNA and less than or equal to 20 human off-targets, with no more than 2 mismatches in the antisense strand. In some embodiments, the siRNA binds with a human MST1 mRNA and less than or equal to 10 human off-targets, with no more than 2 mismatches in the antisense strand. In some embodiments, the siRNA binds with a human MST1 mRNA and less than or equal to 30 human off-targets, with no more than 2 mismatches in the antisense strand. In some embodiments, the siRNA binds with a human MST1 mRNA and less than or equal to 40 human off-targets, with no more than 2 mismatches in the antisense strand. In some embodiments, the siRNA binds with a human MST1 mRNA and less than or equal to 50 human off-targets, with no more than 2 mismatches in the antisense strand. In some embodiments, the siRNA binds with a human MST1 mRNA and less than or equal to 10 human off-targets, with no more than 3 mismatches in the antisense strand. In some embodiments, the siRNA binds with a human MST1 mRNA and less than or equal to 20 human off-targets, with no more than 3 mismatches in the antisense strand. In some embodiments, the siRNA binds with a human MST1 mRNA and less than or equal to 30 human off-targets, with no more than 3 mismatches in the antisense strand. In some embodiments, the siRNA binds with a human MST1 mRNA and less than or equal to 40 human off-targets, with no more than 3 mismatches in the antisense strand. In some embodiments, the siRNA binds with a human MST1 mRNA and less than or equal to 50 human off-targets, with no more than 3 mismatches in the antisense strand.

[0032] In some embodiments, the composition comprises an oligonucleotide that inhibits the expression of MST1, wherein the oligonucleotide comprises an siRNA comprising a sense strand and an antisense strand, siRNA binds with a human MST1 mRNA target site that does not harbor an SNP, with a minor allele frequency (MAF) greater or equal to 1% (pos. 2-18). In some embodiments, the MAF is greater or equal to about 2%, about 3%, about 4%, about 5%, about 6%, about 7%, about 8%, about 9%, about 10%, about 11%, about 12%, about 13%, about 14%, about 15%, about 16%, about 17%, about 18%, about 19%, or about 20%.

[0033] In some embodiments, the composition comprises an oligonucleotide that inhibits the expression of MST1, wherein the oligonucleotide comprises an siRNA comprising a sense strand and an antisense strand, wherein the sense strand comprises a nucleoside sequence comprising or consisting of the sequence of any one of SEQ ID NOs: 1-3024, or a nucleic acid sequence thereof having 1 or 2 nucleoside substitutions, additions, or deletions. In some embodiments, the sense strand comprises a nucleoside sequence comprising or consisting of the sequence of any one of SEQ ID NOs: 1-3024, or a nucleic acid sequence thereof having 3 or 4 nucleoside substitutions, additions, or deletions. In some embodiments, the sense strand further comprises a 3′ overhang. In some embodiments, the 3′ overhang comprises 1, 2, 3, 4, 5, 6, 7, 8, 9, or 10 nucleosides, or a range of nucleotides defined by any two of the aforementioned numbers. In some embodiments, the 3′ overhang comprises 1, 2, or more nucleosides. In some embodiments, the 3′ overhang comprises 2 nucleosides. In some embodiments, the sense strand further comprises a 5′ overhang. In some embodiments, the 5′ overhang comprises 1, 2, 3, 4, 5, 6, 7, 8, 9, or 10 nucleosides, or a range of nucleotides defined by any two of the aforementioned numbers. In some embodiments, the 5′ overhang comprises 1, 2, or more nucleosides. In some embodiments, the 5′ overhang comprises 2 nucleosides. In some embodiments, the sense strand comprises a nucleoside sequence comprising or consisting of the sequence of any one of SEQ ID NOs: 1-3024, or a nucleic acid sequence thereof having 1 or 2 nucleoside additions at the 3′ end. In some embodiments, the composition comprises an oligonucleotide that inhibits the expression of MST1, wherein the oligonucleotide comprises an siRNA comprising a sense strand and an antisense strand, wherein the sense strand comprises a nucleoside sequence comprising or consisting of the sequence of any one of SEQ ID NOs: 1-3024. The sense strand or antisense strand may comprise any modifications described herein. The sense strand or antisense strand may comprise a lipid moiety or a GalNAc moiety.

[0034] In some embodiments, the composition comprises an oligonucleotide that inhibits the expression of MST1, wherein the oligonucleotide comprises an siRNA comprising a sense strand and an antisense strand, wherein the antisense strand comprises a nucleoside sequence comprising or consisting of the sequence of any one of SEQ ID NOs: 3025-6048, or a nucleic acid sequence thereof having 1 or 2 nucleoside substitutions, additions, or deletions. In some embodiments, the antisense strand sequence comprises a nucleoside sequence comprising or consisting of the sequence of any one of SEQ ID NOs: 3025-6048, or a nucleic acid sequence thereof having 3 or 4 nucleoside substitutions, additions, or deletions. In some embodiments, the antisense strand further comprises a 3′ overhang. In some embodiments, the 3′ overhang comprises 1, 2, 3, 4, 5, 6, 7, 8, 9, or 10 nucleosides, or a range of nucleotides defined by any two of the aforementioned numbers. In some embodiments, the 3′ overhang comprises 1, 2, or more nucleosides. In some embodiments, the 3′ overhang comprises 2 nucleosides. In some embodiments, the antisense strand further comprises a 5′ overhang. In some embodiments, the 5′ overhang comprises 1, 2, 3, 4, 5, 6, 7, 8, 9, or 10 nucleosides, or a range of nucleotides defined by any two of the aforementioned numbers. In some embodiments, the 5′ overhang comprises 1, 2, or more nucleosides. In some embodiments, the 5′ overhang comprises 2 nucleosides. In some embodiments, the antisense strand comprises a nucleoside sequence comprising or consisting of the sequence of any one of SEQ ID NOs: 3025-6048, or a nucleic acid sequence thereof having 1 or 2 nucleoside additions at the 3′ end. In some embodiments, the composition comprises an oligonucleotide that inhibits the expression of MST1, wherein the oligonucleotide comprises an siRNA comprising a sense strand and an antisense strand, wherein the antisense strand comprises a nucleoside sequence comprising or consisting of the sequence of any one of SEQ ID NOs: 3025-6048. The sense strand or antisense strand may comprise any modifications described herein. The sense strand or antisense strand may comprise a lipid moiety or a GalNAc moiety.

[0035] In some embodiments, the composition comprises an oligonucleotide that inhibits the expression of MST1, wherein the oligonucleotide comprises an siRNA comprising a sense strand and an antisense strand, wherein the sense strand comprises a nucleoside sequence comprising or consisting of the sequence of any one of SEQ ID NOs: 6358-6387, or a nucleic acid sequence thereof having 1 or 2 nucleoside substitutions, additions, or deletions. In some embodiments, the sense strand comprises a nucleoside sequence comprising or consisting of the sequence of any one of SEQ ID NOs: 6358-6387, or a nucleic acid sequence thereof having 3 or 4 nucleoside substitutions, additions, or deletions. In some embodiments, the sense strand further comprises a 3′ overhang. In some embodiments, the 3′ overhang comprises 1, 2, 3, 4, 5, 6, 7, 8, 9, or 10 nucleosides, or a range of nucleotides defined by any two of the aforementioned numbers. In some embodiments, the 3′ overhang comprises 1, 2, or more nucleosides. In some embodiments, the 3′ overhang comprises 2 nucleosides. In some embodiments, the sense strand further comprises a 5′ overhang. In some embodiments, the 5′ overhang comprises 1, 2, 3, 4, 5, 6, 7, 8, 9, or 10 nucleosides, or a range of nucleotides defined by any two of the aforementioned numbers. In some embodiments, the 5′ overhang comprises 1, 2, or more nucleosides. In some embodiments, the 5′ overhang comprises 2 nucleosides. In some embodiments, the sense strand comprises a nucleoside sequence comprising or consisting of the sequence of any one of SEQ ID NOs: 6358-6387, or a nucleic acid sequence thereof having 1 or 2 nucleoside additions at the 3′ end. In some embodiments, the composition comprises an oligonucleotide that inhibits the expression of MST1, wherein the oligonucleotide comprises an siRNA comprising a sense strand and an antisense strand, wherein the sense strand comprises a nucleoside sequence comprising or consisting of the sequence of any one of SEQ ID NOs: 6358-6387. The sense strand or antisense strand may comprise any modifications described herein. The sense strand or antisense strand may comprise a lipid moiety or a GalNAc moiety.

[0036] In some embodiments, the composition comprises an oligonucleotide that inhibits the expression of MST1, wherein the oligonucleotide comprises an siRNA comprising a sense strand and an antisense strand, wherein the antisense strand comprises a nucleoside sequence comprising or consisting of the sequence of any one of SEQ ID NOs: 6388-6417, or a nucleic acid sequence thereof having 1 or 2 nucleoside substitutions, additions, or deletions. In some embodiments, the antisense strand sequence comprises a nucleoside sequence comprising or consisting of the sequence of any one of SEQ ID NOs: 6388-6417, or a nucleic acid sequence thereof having 3 or 4 nucleoside substitutions, additions, or deletions. In some embodiments, the antisense strand further comprises a 3′ overhang. In some embodiments, the 3′ overhang comprises 1, 2, 3, 4, 5, 6, 7, 8, 9, or 10 nucleosides, or a range of nucleotides defined by any two of the aforementioned numbers. In some embodiments, the 3′ overhang comprises 1, 2, or more nucleosides. In some embodiments, the 3′ overhang comprises 2 nucleosides. In some embodiments, the antisense strand further comprises a 5′ overhang. In some embodiments, the 5′ overhang comprises 1, 2, 3, 4, 5, 6, 7, 8, 9, or 10 nucleosides, or a range of nucleotides defined by any two of the aforementioned numbers. In some embodiments, the 5′ overhang comprises 1, 2, or more nucleosides. In some embodiments, the 5′ overhang comprises 2 nucleosides. In some embodiments, the antisense strand comprises a nucleoside sequence comprising or consisting of the sequence of any one of SEQ ID NOs: 6388-6417, or a nucleic acid sequence thereof having 1 or 2 nucleoside additions at the 3′ end. In some embodiments, the composition comprises an oligonucleotide that inhibits the expression of MST1, wherein the oligonucleotide comprises an siRNA comprising a sense strand and an antisense strand, wherein the antisense strand comprises a nucleoside sequence comprising or consisting of the sequence of any one of SEQ ID NOs: 6388-6417. The sense strand or antisense strand may comprise any modifications described herein. The sense strand or antisense strand may comprise a lipid moiety or a GalNAc moiety.

[0037] In some embodiments, the siRNA comprises the sense strand and/or the antisense strand sequence of an siRNA in any one of Tables 3-8, or a nucleic acid sequence thereof having 3 or 4 nucleoside substitutions, additions, or deletions. In some embodiments, the siRNA comprises the sense strand and/or the antisense strand sequence of an siRNA in any one of Tables 3-8, or a nucleic acid sequence thereof having 1 or 2 nucleoside substitutions, additions, or deletions. In some embodiments, the siRNA comprises the sense strand and/or the antisense strand sequence of an siRNA in any one of Tables 3-8. In some embodiments, the siRNA is cross-reactive with a non-human primate (NHP) MST1 mRNA. The sense strand or antisense strand may comprise any modifications described herein. The sense strand or antisense strand may comprise a lipid moiety or a GalNAc moiety.

[0038] In some embodiments, the siRNA comprises the sequence of a sense strand in Table 24B, or a nucleic acid sequence thereof having 3 or 4 nucleoside substitutions, additions, or deletions. In some embodiments, the siRNA comprises the sequence of a sense strand in Table 24B, or a nucleic acid sequence thereof having 1 or 2 nucleoside substitutions, additions, or deletions. In some embodiments, the siRNA comprises the sequence of a sense strand in Table 24B. The sense strand may include any of these sequences may include an overhang such as a 3′ UU overhang. The sense strand may include any modifications described herein. The sense strand may include a lipid moiety or a GalNAc moiety. In some embodiments, the siRNA comprises the sequence of an antisense strand in Table 24B, or a nucleic acid sequence thereof having 3 or 4 nucleoside substitutions, additions, or deletions. In some embodiments, the siRNA comprises the sequence of an antisense strand in Table 24B, or a nucleic acid sequence thereof having 1 or 2 nucleoside substitutions, additions, or deletions. In some embodiments, the siRNA comprises the sequence of an antisense strand in Table 24B. The antisense strand may include any of these sequences may include an overhang such as a 3′ UU overhang. The antisense strand may include any modifications described herein. The antisense strand may include a lipid moiety or a GalNAc moiety.

[0039] In some embodiments, the siRNA comprises the sequence of a sense strand in Table 24D, or a nucleic acid sequence thereof having 3 or 4 nucleoside substitutions, additions, or deletions. In some embodiments, the siRNA comprises the sequence of a sense strand in Table 24D, or a nucleic acid sequence thereof having 1 or 2 nucleoside substitutions, additions, or deletions. In some embodiments, the siRNA comprises the sequence of a sense strand in Table 24D. The sense strand may include any of these sequences may include an overhang such as a 3′ UU overhang. The sense strand may include any modifications described herein. The sense strand may include a lipid moiety or a GalNAc moiety. In some embodiments, the siRNA comprises the sequence of an antisense strand in Table 24D, or a nucleic acid sequence thereof having 3 or 4 nucleoside substitutions, additions, or deletions. In some embodiments, the siRNA comprises the sequence of an antisense strand in Table 24D, or a nucleic acid sequence thereof having 1 or 2 nucleoside substitutions, additions, or deletions. In some embodiments, the siRNA comprises the sequence of an antisense strand in Table 24D. The antisense strand may include any of these sequences may include an overhang such as a 3′ UU overhang. The antisense strand may include any modifications described herein. The antisense strand may include a lipid moiety or a GalNAc moiety.

[0040] In some embodiments, the siRNA comprises the sense strand and/or the antisense strand sequence of an siRNA in Table 33B or Table 33C, or a nucleic acid sequence thereof having 3 or 4 nucleoside substitutions, additions, or deletions. In some embodiments, the siRNA comprises the sense strand and/or the antisense strand sequence of an siRNA in Table 33B or Table 33C, or a nucleic acid sequence thereof having 1 or 2 nucleoside substitutions, additions, or deletions. In some embodiments, the siRNA comprises the sense strand and/or the antisense strand sequence of an siRNA in Table 33B or Table 33C. In some embodiments, the siRNA is cross-reactive with a non-human primate (NHP) MST1 mRNA. The sense strand or antisense strand may comprise any modifications described herein. The sense strand or antisense strand may comprise a lipid moiety or a GalNAc moiety.

[0041] The siRNA may comprise the sense strand and/or the antisense strand base sequence (e.g. unmodified sequence, or base sequence with other modifications) of an siRNA in any table included herein; or may include a nucleic acid sequence thereof having 1 or 2 nucleoside substitutions, additions, or deletions; or may include a nucleic acid sequence thereof having 3 or 4 nucleoside substitutions, additions, or deletions. In some cases, the sequence does not include an overhang (e.g. UU) that is included in a table.

[0042] In some embodiments, the siRNA comprises the sense strand and/or the antisense strand sequence of an siRNA of subset A, or a nucleic acid sequence thereof having 3 or 4 nucleoside substitutions, additions, or deletions. In some embodiments, the siRNA comprises the sense strand and/or the antisense strand sequence of an siRNA of subset A, or a nucleic acid sequence thereof having 1 or 2 nucleoside substitutions, additions, or deletions. In some embodiments, the siRNA comprises the sense strand and/or the antisense strand sequence of an siRNA of subset A. In some embodiments, the siRNA is cross-reactive with a non-human primate (NHP) MST1 mRNA. The sense strand or antisense strand may comprise any modifications described herein. The sense strand or antisense strand may comprise a lipid moiety or a GalNAc moiety.

[0043] In some embodiments, the siRNA comprises the sense strand and/or the antisense strand sequence of an siRNA of subset B, or a nucleic acid sequence thereof having 3 or 4 nucleoside substitutions, additions, or deletions. In some embodiments, the siRNA comprises the sense strand and/or the antisense strand sequence of an siRNA of subset B, or a nucleic acid sequence thereof having 1 or 2 nucleoside substitutions, additions, or deletions. In some embodiments, the siRNA comprises the sense strand and/or the antisense strand sequence of an siRNA of subset B. In some embodiments, the siRNA is cross-reactive with a non-human primate (NHP) MST1 mRNA. The sense strand or antisense strand may comprise any modifications described herein. The sense strand or antisense strand may comprise a lipid moiety or a GalNAc moiety.

[0044] In some embodiments, the siRNA comprises the sense strand and/or the antisense strand sequence of an siRNA of subset C, or a nucleic acid sequence thereof having 3 or 4 nucleoside substitutions, additions, or deletions. In some embodiments, the siRNA comprises the sense strand and/or the antisense strand sequence of an siRNA of subset C, or a nucleic acid sequence thereof having 1 or 2 nucleoside substitutions, additions, or deletions. In some embodiments, the siRNA comprises the sense strand and/or the antisense strand sequence of an siRNA of subset C. In some embodiments, the siRNA is cross-reactive with a non-human primate (NHP) MST1 mRNA. The sense strand or antisense strand may comprise any modifications described herein. The sense strand or antisense strand may comprise a lipid moiety or a GalNAc moiety.

[0045] In some embodiments, the siRNA comprises the sense strand and/or the antisense strand sequence of an siRNA of subset D, or a nucleic acid sequence thereof having 3 or 4 nucleoside substitutions, additions, or deletions. In some embodiments, the siRNA comprises the sense strand and/or the antisense strand sequence of an siRNA of subset D, or a nucleic acid sequence thereof having 1 or 2 nucleoside substitutions, additions, or deletions. In some embodiments, the siRNA comprises the sense strand and/or the antisense strand sequence of an siRNA of subset D. In some embodiments, the siRNA is cross-reactive with a non-human primate (NHP) MST1 mRNA. The sense strand or antisense strand may comprise any modifications described herein. The sense strand or antisense strand may comprise a lipid moiety or a GalNAc moiety.

[0046] In some embodiments, the siRNA comprises the sense strand and/or the antisense strand sequence of an siRNA of subset E, or a nucleic acid sequence thereof having 3 or 4 nucleoside substitutions, additions, or deletions. In some embodiments, the siRNA comprises the sense strand and/or the antisense strand sequence of an siRNA of subset E, or a nucleic acid sequence thereof having 1 or 2 nucleoside substitutions, additions, or deletions. In some embodiments, the siRNA comprises the sense strand and/or the antisense strand sequence of an siRNA of subset E. In some embodiments, the siRNA is cross-reactive with a non-human primate (NHP) MST1 mRNA. The sense strand or antisense strand may comprise any modifications described herein. The sense strand or antisense strand may comprise a lipid moiety or a GalNAc moiety.

[0047] In some embodiments, the siRNA comprises the sense strand and/or the antisense strand sequence of an siRNA of subset F, or a nucleic acid sequence thereof having 3 or 4 nucleoside substitutions, additions, or deletions. In some embodiments, the siRNA comprises the sense strand and/or the antisense strand sequence of an siRNA of subset F, or a nucleic acid sequence thereof having 1 or 2 nucleoside substitutions, additions, or deletions. In some embodiments, the siRNA comprises the sense strand and/or the antisense strand sequence of an siRNA of subset F. In some embodiments, the siRNA is cross-reactive with a non-human primate (NHP) MST1 mRNA. The sense strand or antisense strand may comprise any modifications described herein. The sense strand or antisense strand may comprise a lipid moiety or a GalNAc moiety.

[0048] In some embodiments, the siRNA comprises a sense strand having a sequence in accordance with any of SEQ ID NOs: 6373, 6375, 6385, 6386, or 6387. In some embodiments, the sense strand sequence comprises or consists of sequence at least 75% identical to any one of SEQ ID NOs: 6373, 6375, 6385, 6386, or 6387, at least 80% identical to any one of SEQ ID NOs: 6373, 6375, 6385, 6386, or 6387, at least 85% identical to of any one of SEQ ID NOs: 6373, 6375, 6385, 6386, or 6387, at least 90% identical to any one of SEQ ID NOs: 6373, 6375, 6385, 6386, or 6387, or at least 95% identical to any one of SEQ ID NOs: 6373, 6375, 6385, 6386, or 6387. In some embodiments, the sense strand sequence comprises or consists of the sequence of any one of SEQ ID NOs 6373, 6375, 6385, 6386, or 6387, or a sense strand sequence thereof having 1, 2, 3, or 4 nucleoside substitutions, additions, or deletions. In some embodiments, the sense strand sequence comprises or consists of the sequence of any one of SEQ ID NOs: 6373, 6375, 6385, 6386, or 6387, or a sense strand sequence thereof having 1 or 2 nucleoside substitutions, additions, or deletions. In some embodiments, the sense strand sequence comprises or consists of a sequence 100% identical to SEQ ID NOs: 6373, 6375, 6385, 6386, or 6387. The sense strand sequence may include the first 5, 6, 7, 8, 9, 10, 11, 12, 13, 14, 15, 16, 17, 18, or 19 nucleotides (in the 5′ to 3′ direction) of any of the aforementioned sequences. The sense strand sequence may include the last 5, 6, 7, 8, 9, 10, 11, 12, 13, 14, 15, 16, 17, 18, or 19 nucleotides (in the 5′ to 3′ direction) of any of the aforementioned sequences. The sense strand may comprise a modification pattern described herein. The sense strand may comprise an overhang. The sense strand may comprise a lipid moiety. The sense strand may comprise a GalNAc moiety.

[0049] In some embodiments, the siRNA comprises an antisense strand having a sequence in accordance with any of SEQ ID NOs: 6403, 6405, 6415, 6416, or 6417. In some embodiments, the antisense strand sequence comprises or consists of sequence at least 75% identical to any one of SEQ ID NOs: 6403, 6405, 6415, 6416, or 6417, at least 80% identical to any one of SEQ ID NOs: 6403, 6405, 6415, 6416, or 6417, at least 85% identical to of any one of SEQ ID NOs: 6403, 6405, 6415, 6416, or 6417, at least 90% identical to any one of SEQ ID NOs: 6403, 6405, 6415, 6416, or 6417, or at least 95% identical to any one of SEQ ID NOs: 6403, 6405, 6415, 6416, or 6417. In some embodiments, the antisense strand sequence comprises or consists of the sequence of any one of SEQ ID NOs: 6403, 6405, 6415, 6416, or 6417, or an antisense strand sequence thereof having 1, 2, 3, or 4 nucleoside substitutions, additions, or deletions. In some embodiments, the antisense strand sequence comprises or consists of the sequence of any one of SEQ ID NOs: 6403, 6405, 6415, 6416, or 6417, or an antisense strand sequence thereof having 1 or 2 nucleoside substitutions, additions, or deletions. In some embodiments, the antisense strand sequence comprises or consists of a sequence 100% identical to SEQ ID NOs: 6403, 6405, 6415, 6416, or 6417. The antisense strand sequence may include the first 5, 6, 7, 8, 9, 10, 11, 12, 13, 14, 15, 16, 17, 18, or 19 nucleotides (in the 5′ to 3′ direction) of any of the aforementioned sequences. The antisense strand sequence may include the last 5, 6, 7, 8, 9, 10, 11, 12, 13, 14, 15, 16, 17, 18, or 19 nucleotides (in the 5′ to 3′ direction) of any of the aforementioned sequences. The antisense strand may comprise an overhang. The antisense strand may comprise a modification pattern described herein. The antisense strand may comprise a lipid moiety or a GalNAc moiety.

[0050] In some embodiments, the siRNA comprises a sense strand having a sequence in accordance with SEQ ID NO: 6373. In some embodiments, the sense strand sequence comprises or consists of sequence at least 75% identical to SEQ ID NO: 6373, at least 80% identical to SEQ ID NO: 6373, at least 85% identical to SEQ ID NO: 6373, at least 90% identical to SEQ ID NO: 6373, or at least 95% identical to SEQ ID NO: 6373. In some embodiments, the sense strand sequence comprises or consists of the sequence of SEQ ID NO 6373, or a sense strand sequence thereof having 1, 2, 3, or 4 nucleoside substitutions, additions, or deletions. In some embodiments, the sense strand sequence comprises or consists of the sequence of SEQ ID NO: 6373, or a sense strand sequence thereof having 1 or 2 nucleoside substitutions, additions, or deletions. In some embodiments, the sense strand sequence comprises or consists of a sequence 100% identical to SEQ ID NO: 6373. The sense strand may comprise a modification pattern described herein. The sense strand may comprise an overhang. The sense strand may comprise a lipid moiety. The sense strand may comprise a GalNAc moiety.

[0051] In some embodiments, the siRNA comprises a sense strand having a sequence in accordance with SEQ ID NO: 6374. In some embodiments, the sense strand sequence comprises or consists of sequence at least 75% identical to SEQ ID NO: 6374, at least 80% identical to SEQ ID NO: 6374, at least 85% identical to SEQ ID NO: 6374, at least 90% identical to SEQ ID NO: 6374, or at least 95% identical to SEQ ID NO: 6374. In some embodiments, the sense strand sequence comprises or consists of the sequence of SEQ ID NO 6374, or a sense strand sequence thereof having 1, 2, 3, or 4 nucleoside substitutions, additions, or deletions. In some embodiments, the sense strand sequence comprises or consists of the sequence of SEQ ID NO: 6374, or a sense strand sequence thereof having 1 or 2 nucleoside substitutions, additions, or deletions. In some embodiments, the sense strand sequence comprises or consists of a sequence 100% identical to SEQ ID NO: 6374. The sense strand may comprise a modification pattern described herein. The sense strand may comprise an overhang. The sense strand may comprise a lipid moiety. The sense strand may comprise a GalNAc moiety.

[0052] In some embodiments, the siRNA comprises a sense strand having a sequence in accordance with SEQ ID NO: 6385. In some embodiments, the sense strand sequence comprises or consists of sequence at least 75% identical to SEQ ID NO: 6385, at least 80% identical to SEQ ID NO: 6385, at least 85% identical to SEQ ID NO: 6385, at least 90% identical to SEQ ID NO: 6385, or at least 95% identical to SEQ ID NO: 6385. In some embodiments, the sense strand sequence comprises or consists of the sequence of SEQ ID NO 6385, or a sense strand sequence thereof having 1, 2, 3, or 4 nucleoside substitutions, additions, or deletions. In some embodiments, the sense strand sequence comprises or consists of the sequence of SEQ ID NO: 6385, or a sense strand sequence thereof having 1 or 2 nucleoside substitutions, additions, or deletions. In some embodiments, the sense strand sequence comprises or consists of a sequence 100% identical to SEQ ID NO: 6385. The sense strand may comprise a modification pattern described herein. The sense strand may comprise an overhang. The sense strand may comprise a lipid moiety. The sense strand may comprise a GalNAc moiety.

[0053] In some embodiments, the siRNA comprises a sense strand having a sequence in accordance with SEQ ID NO: 6386. In some embodiments, the sense strand sequence comprises or consists of sequence at least 75% identical to SEQ ID NO: 6386, at least 80% identical to SEQ ID NO: 6386, at least 85% identical to SEQ ID NO: 6386, at least 90% identical to SEQ ID NO: 6386, or at least 95% identical to SEQ ID NO: 6386. In some embodiments, the sense strand sequence comprises or consists of the sequence of SEQ ID NO 6386, or a sense strand sequence thereof having 1, 2, 3, or 4 nucleoside substitutions, additions, or deletions. In some embodiments, the sense strand sequence comprises or consists of the sequence of SEQ ID NO: 6386, or a sense strand sequence thereof having 1 or 2 nucleoside substitutions, additions, or deletions. In some embodiments, the sense strand sequence comprises or consists of a sequence 100% identical to SEQ ID NO: 6386. The sense strand may comprise a modification pattern described herein. The sense strand may comprise an overhang. The sense strand may comprise a lipid moiety. The sense strand may comprise a GalNAc moiety.

[0054] In some embodiments, the siRNA comprises a sense strand having a sequence in accordance with SEQ ID NO: 6387. In some embodiments, the sense strand sequence comprises or consists of sequence at least 75% identical to SEQ ID NO: 6387, at least 80% identical to SEQ ID NO: 6387, at least 85% identical to SEQ ID NO: 6387, at least 90% identical to SEQ ID NO: 6387, or at least 95% identical to SEQ ID NO: 6387. In some embodiments, the sense strand sequence comprises or consists of the sequence of SEQ ID NO 6387, or a sense strand sequence thereof having 1, 2, 3, or 4 nucleoside substitutions, additions, or deletions. In some embodiments, the sense strand sequence comprises or consists of the sequence of SEQ ID NO: 6387, or a sense strand sequence thereof having 1 or 2 nucleoside substitutions, additions, or deletions. In some embodiments, the sense strand sequence comprises or consists of a sequence 100% identical to SEQ ID NO: 6387. The sense strand may comprise a modification pattern described herein. The sense strand may comprise an overhang. The sense strand may comprise a lipid moiety. The sense strand may comprise a GalNAc moiety.

[0055] In some embodiments, the siRNA comprises an antisense strand having a sequence in accordance with SEQ ID NO: 6403. In some embodiments, the antisense strand sequence comprises or consists of sequence at least 75% identical to SEQ ID NO: 6403, at least 80% identical to SEQ ID NO: 6403, at least 85% identical to SEQ ID NO: 6403, at least 90% identical to SEQ ID NO: 6403, or at least 95% identical to SEQ ID NO: 6403. In some embodiments, the antisense strand sequence comprises or consists of the sequence of SEQ ID NO 6403, or an antisense strand sequence thereof having 1, 2, 3, or 4 nucleoside substitutions, additions, or deletions. In some embodiments, the antisense strand sequence comprises or consists of the sequence of SEQ ID NO: 6403, or an antisense strand sequence thereof having 1 or 2 nucleoside substitutions, additions, or deletions. In some embodiments, the antisense strand sequence comprises or consists of a sequence 100% identical to SEQ ID NO: 6403. The antisense strand may comprise a modification pattern described herein. The antisense strand may comprise an overhang. The antisense strand may comprise a lipid moiety. The antisense strand may comprise a GalNAc moiety.

[0056] In some embodiments, the siRNA comprises an antisense strand having a sequence in accordance with SEQ ID NO: 6405. In some embodiments, the antisense strand sequence comprises or consists of sequence at least 75% identical to SEQ ID NO: 6405, at least 80% identical to SEQ ID NO: 6405, at least 85% identical to SEQ ID NO: 6405, at least 90% identical to SEQ ID NO: 6405, or at least 95% identical to SEQ ID NO: 6405. In some embodiments, the antisense strand sequence comprises or consists of the sequence of SEQ ID NO 6405, or an antisense strand sequence thereof having 1, 2, 3, or 4 nucleoside substitutions, additions, or deletions. In some embodiments, the antisense strand sequence comprises or consists of the sequence of SEQ ID NO: 6405, or an antisense strand sequence thereof having 1 or 2 nucleoside substitutions, additions, or deletions. In some embodiments, the antisense strand sequence comprises or consists of a sequence 100% identical to SEQ ID NO: 6405. The antisense strand may comprise a modification pattern described herein. The antisense strand may comprise an overhang. The antisense strand may comprise a lipid moiety. The antisense strand may comprise a GalNAc moiety.

[0057] In some embodiments, the siRNA comprises an antisense strand having a sequence in accordance with SEQ ID NO: 6415. In some embodiments, the antisense strand sequence comprises or consists of sequence at least 75% identical to SEQ ID NO: 6415, at least 80% identical to SEQ ID NO: 6415, at least 85% identical to SEQ ID NO: 6415, at least 90% identical to SEQ ID NO: 6415, or at least 95% identical to SEQ ID NO: 6415. In some embodiments, the antisense strand sequence comprises or consists of the sequence of SEQ ID NO 6415, or an antisense strand sequence thereof having 1, 2, 3, or 4 nucleoside substitutions, additions, or deletions. In some embodiments, the antisense strand sequence comprises or consists of the sequence of SEQ ID NO: 6415, or an antisense strand sequence thereof having 1 or 2 nucleoside substitutions, additions, or deletions. In some embodiments, the antisense strand sequence comprises or consists of a sequence 100% identical to SEQ ID NO: 6415. The antisense strand may comprise a modification pattern described herein. The antisense strand may comprise an overhang. The antisense strand may comprise a lipid moiety. The antisense strand may comprise a GalNAc moiety.

[0058] In some embodiments, the siRNA comprises an antisense strand having a sequence in accordance with SEQ ID NO: 6416. In some embodiments, the antisense strand sequence comprises or consists of sequence at least 75% identical to SEQ ID NO: 6416, at least 80% identical to SEQ ID NO: 6416, at least 85% identical to SEQ ID NO: 6416, at least 90% identical to SEQ ID NO: 6416, or at least 95% identical to SEQ ID NO: 6416. In some embodiments, the antisense strand sequence comprises or consists of the sequence of SEQ ID NO 6416, or an antisense strand sequence thereof having 1, 2, 3, or 4 nucleoside substitutions, additions, or deletions. In some embodiments, the antisense strand sequence comprises or consists of the sequence of SEQ ID NO: 6416, or an antisense strand sequence thereof having 1 or 2 nucleoside substitutions, additions, or deletions. In some embodiments, the antisense strand sequence comprises or consists of a sequence 100% identical to SEQ ID NO: 6416. The antisense strand may comprise a modification pattern described herein. The antisense strand may comprise an overhang. The antisense strand may comprise a lipid moiety. The antisense strand may comprise a GalNAc moiety.

[0059] In some embodiments, the siRNA comprises an antisense strand having a sequence in accordance with SEQ ID NO: 6417. In some embodiments, the antisense strand sequence comprises or consists of sequence at least 75% identical to SEQ ID NO: 6417, at least 80% identical to SEQ ID NO: 6417, at least 85% identical to SEQ ID NO: 6417, at least 90% identical to SEQ ID NO: 6417, or at least 95% identical to SEQ ID NO: 6417. In some embodiments, the antisense strand sequence comprises or consists of the sequence of SEQ ID NO 6417, or an antisense strand sequence thereof having 1, 2, 3, or 4 nucleoside substitutions, additions, or deletions. In some embodiments, the antisense strand sequence comprises or consists of the sequence of SEQ ID NO: 6417, or an antisense strand sequence thereof having 1 or 2 nucleoside substitutions, additions, or deletions. In some embodiments, the antisense strand sequence comprises or consists of a sequence 100% identical to SEQ ID NO: 6417. The antisense strand may comprise a modification pattern described herein. The antisense strand may comprise an overhang. The antisense strand may comprise a lipid moiety. The antisense strand may comprise a GalNAc moiety.

[0060] In some embodiments, the siRNA comprises a sense strand having a sequence in accordance with SEQ ID NO: 6440. In some embodiments, the sense strand sequence comprises or consists of sequence at least 75% identical to SEQ ID NO: 6440, at least 80% identical to SEQ ID NO: 6440, at least 85% identical to SEQ ID NO: 6440, at least 90% identical to SEQ ID NO: 6440, or at least 95% identical to SEQ ID NO: 6440. In some embodiments, the sense strand sequence comprises or consists of the sequence of SEQ ID NO 6440, or a sense strand sequence thereof having 1, 2, 3, or 4 nucleoside substitutions, additions, or deletions. In some embodiments, the sense strand sequence comprises or consists of the sequence of SEQ ID NO: 6440, or a sense strand sequence thereof having 1 or 2 nucleoside substitutions, additions, or deletions. In some embodiments, the sense strand sequence comprises or consists of a sequence 100% identical to SEQ ID NO: 6440. The sense strand may comprise a modification pattern described herein. The sense strand may comprise an overhang. The sense strand may comprise a moiety such as a GalNAc moiety or a lipid moiety. In some embodiments, the siRNA comprises an antisense strand having a sequence in accordance with SEQ ID NO: 6499. In some embodiments, the antisense strand sequence comprises or consists of sequence at least 75% identical to SEQ ID NO: 6499, at least 80% identical to SEQ ID NO: 6499, at least 85% identical to SEQ ID NO: 6499, at least 90% identical to SEQ ID NO: 6499, or at least 95% identical to SEQ ID NO: 6499. In some embodiments, the antisense strand sequence comprises or consists of the sequence of SEQ ID NO 6499, or an antisense strand sequence thereof having 1, 2, 3, or 4 nucleoside substitutions, additions, or deletions. In some embodiments, the antisense strand sequence comprises or consists of the sequence of SEQ ID NO: 6499, or an antisense strand sequence thereof having 1 or 2 nucleoside substitutions, additions, or deletions. In some embodiments, the antisense strand sequence comprises or consists of a sequence 100% identical to SEQ ID NO: 6499. The antisense strand may comprise a modification pattern described herein. The antisense strand may comprise an overhang. The antisense strand may comprise a moiety such as a GalNAc moiety or a lipid moiety.

[0061] In some embodiments, the siRNA comprises a sense strand having a sequence in accordance with SEQ ID NO: 6446. In some embodiments, the sense strand sequence comprises or consists of sequence at least 75% identical to SEQ ID NO: 6446, at least 80% identical to SEQ ID NO: 6446, at least 85% identical to SEQ ID NO: 6446, at least 90% identical to SEQ ID NO: 6446, or at least 95% identical to SEQ ID NO: 6446. In some embodiments, the sense strand sequence comprises or consists of the sequence of SEQ ID NO 6446, or a sense strand sequence thereof having 1, 2, 3, or 4 nucleoside substitutions, additions, or deletions. In some embodiments, the sense strand sequence comprises or consists of the sequence of SEQ ID NO: 6446, or a sense strand sequence thereof having 1 or 2 nucleoside substitutions, additions, or deletions. In some embodiments, the sense strand sequence comprises or consists of a sequence 100% identical to SEQ ID NO: 6446. The sense strand may comprise a modification pattern described herein. The sense strand may comprise an overhang. The sense strand may comprise a moiety such as a GalNAc moiety or a lipid moiety. In some embodiments, the siRNA comprises an antisense strand having a sequence in accordance with SEQ ID NO: 6505. In some embodiments, the antisense strand sequence comprises or consists of sequence at least 75% identical to SEQ ID NO: 6505, at least 80% identical to SEQ ID NO: 6505, at least 85% identical to SEQ ID NO: 6505, at least 90% identical to SEQ ID NO: 6505, or at least 95% identical to SEQ ID NO: 6505. In some embodiments, the antisense strand sequence comprises or consists of the sequence of SEQ ID NO 6505, or an antisense strand sequence thereof having 1, 2, 3, or 4 nucleoside substitutions, additions, or deletions. In some embodiments, the antisense strand sequence comprises or consists of the sequence of SEQ ID NO: 6505, or an antisense strand sequence thereof having 1 or 2 nucleoside substitutions, additions, or deletions. In some embodiments, the antisense strand sequence comprises or consists of a sequence 100% identical to SEQ ID NO: 6505. The antisense strand may comprise a modification pattern described herein. The antisense strand may comprise an overhang. The antisense strand may comprise a moiety such as a GalNAc moiety or a lipid moiety.

[0062] In some embodiments, the siRNA comprises a sense strand having a sequence in accordance with SEQ ID NO: 6447. In some embodiments, the sense strand sequence comprises or consists of sequence at least 75% identical to SEQ ID NO: 6447, at least 80% identical to SEQ ID NO: 6447, at least 85% identical to SEQ ID NO: 6447, at least 90% identical to SEQ ID NO: 6447, or at least 95% identical to SEQ ID NO: 6447. In some embodiments, the sense strand sequence comprises or consists of the sequence of SEQ ID NO 6447, or a sense strand sequence thereof having 1, 2, 3, or 4 nucleoside substitutions, additions, or deletions. In some embodiments, the sense strand sequence comprises or consists of the sequence of SEQ ID NO: 6447, or a sense strand sequence thereof having 1 or 2 nucleoside substitutions, additions, or deletions. In some embodiments, the sense strand sequence comprises or consists of a sequence 100% identical to SEQ ID NO: 6447. The sense strand may comprise a modification pattern described herein. The sense strand may comprise an overhang. The sense strand may comprise a moiety such as a GalNAc moiety or a lipid moiety. In some embodiments, the siRNA comprises an antisense strand having a sequence in accordance with SEQ ID NO: 6506. In some embodiments, the antisense strand sequence comprises or consists of sequence at least 75% identical to SEQ ID NO: 6506, at least 80% identical to SEQ ID NO: 6506, at least 85% identical to SEQ ID NO: 6506, at least 90% identical to SEQ ID NO: 6506, or at least 95% identical to SEQ ID NO: 6506. In some embodiments, the antisense strand sequence comprises or consists of the sequence of SEQ ID NO 6506, or an antisense strand sequence thereof having 1, 2, 3, or 4 nucleoside substitutions, additions, or deletions. In some embodiments, the antisense strand sequence comprises or consists of the sequence of SEQ ID NO: 6506, or an antisense strand sequence thereof having 1 or 2 nucleoside substitutions, additions, or deletions. In some embodiments, the antisense strand sequence comprises or consists of a sequence 100% identical to SEQ ID NO: 6506. The antisense strand may comprise a modification pattern described herein. The antisense strand may comprise an overhang. The antisense strand may comprise a moiety such as a GalNAc moiety or a lipid moiety.

[0063] In some embodiments, the siRNA comprises a sense strand having a sequence in accordance with SEQ ID NO: 6448. In some embodiments, the sense strand sequence comprises or consists of sequence at least 75% identical to SEQ ID NO: 6448, at least 80% identical to SEQ ID NO: 6448, at least 85% identical to SEQ ID NO: 6448, at least 90% identical to SEQ ID NO: 6448, or at least 95% identical to SEQ ID NO: 6448. In some embodiments, the sense strand sequence comprises or consists of the sequence of SEQ ID NO 6448, or a sense strand sequence thereof having 1, 2, 3, or 4 nucleoside substitutions, additions, or deletions. In some embodiments, the sense strand sequence comprises or consists of the sequence of SEQ ID NO: 6448, or a sense strand sequence thereof having 1 or 2 nucleoside substitutions, additions, or deletions. In some embodiments, the sense strand sequence comprises or consists of a sequence 100% identical to SEQ ID NO: 6448. The sense strand may comprise a modification pattern described herein. The sense strand may comprise an overhang. The sense strand may comprise a moiety such as a GalNAc moiety or a lipid moiety. In some embodiments, the siRNA comprises an antisense strand having a sequence in accordance with SEQ ID NO: 6507. In some embodiments, the antisense strand sequence comprises or consists of sequence at least 75% identical to SEQ ID NO: 6507, at least 80% identical to SEQ ID NO: 6507, at least 85% identical to SEQ ID NO: 6507, at least 90% identical to SEQ ID NO: 6507, or at least 95% identical to SEQ ID NO: 6507. In some embodiments, the antisense strand sequence comprises or consists of the sequence of SEQ ID NO 6507, or an antisense strand sequence thereof having 1, 2, 3, or 4 nucleoside substitutions, additions, or deletions. In some embodiments, the antisense strand sequence comprises or consists of the sequence of SEQ ID NO: 6507, or an antisense strand sequence thereof having 1 or 2 nucleoside substitutions, additions, or deletions. In some embodiments, the antisense strand sequence comprises or consists of a sequence 100% identical to SEQ ID NO: 6507. The antisense strand may comprise a modification pattern described herein. The antisense strand may comprise an overhang. The antisense strand may comprise a moiety such as a GalNAc moiety or a lipid moiety.

[0064] In some embodiments, the siRNA comprises a sense strand having a sequence in accordance with SEQ ID NO: 6461. In some embodiments, the sense strand sequence comprises or consists of sequence at least 75% identical to SEQ ID NO: 6461, at least 80% identical to SEQ ID NO: 6461, at least 85% identical to SEQ ID NO: 6461, at least 90% identical to SEQ ID NO: 6461, or at least 95% identical to SEQ ID NO: 6461. In some embodiments, the sense strand sequence comprises or consists of the sequence of SEQ ID NO 6461, or a sense strand sequence thereof having 1, 2, 3, or 4 nucleoside substitutions, additions, or deletions. In some embodiments, the sense strand sequence comprises or consists of the sequence of SEQ ID NO: 6461, or a sense strand sequence thereof having 1 or 2 nucleoside substitutions, additions, or deletions. In some embodiments, the sense strand sequence comprises or consists of a sequence 100% identical to SEQ ID NO: 6461. The sense strand may comprise a modification pattern described herein. The sense strand may comprise an overhang. The sense strand may comprise a moiety such as a GalNAc moiety or a lipid moiety. In some embodiments, the siRNA comprises an antisense strand having a sequence in accordance with SEQ ID NO: 6520. In some embodiments, the antisense strand sequence comprises or consists of sequence at least 75% identical to SEQ ID NO: 6520, at least 80% identical to SEQ ID NO: 6520, at least 85% identical to SEQ ID NO: 6520, at least 90% identical to SEQ ID NO: 6520, or at least 95% identical to SEQ ID NO: 6520. In some embodiments, the antisense strand sequence comprises or consists of the sequence of SEQ ID NO 6520, or an antisense strand sequence thereof having 1, 2, 3, or 4 nucleoside substitutions, additions, or deletions. In some embodiments, the antisense strand sequence comprises or consists of the sequence of SEQ ID NO: 6520, or an antisense strand sequence thereof having 1 or 2 nucleoside substitutions, additions, or deletions. In some embodiments, the antisense strand sequence comprises or consists of a sequence 100% identical to SEQ ID NO: 6520. The antisense strand may comprise a modification pattern described herein. The antisense strand may comprise an overhang. The antisense strand may comprise a moiety such as a GalNAc moiety or a lipid moiety.

[0065] In some embodiments, the siRNA comprises a sense strand having a sequence in accordance with SEQ ID NO: 6466. In some embodiments, the sense strand sequence comprises or consists of sequence at least 75% identical to SEQ ID NO: 6466, at least 80% identical to SEQ ID NO: 6466, at least 85% identical to SEQ ID NO: 6466, at least 90% identical to SEQ ID NO: 6466, or at least 95% identical to SEQ ID NO: 6466. In some embodiments, the sense strand sequence comprises or consists of the sequence of SEQ ID NO 6466, or a sense strand sequence thereof having 1, 2, 3, or 4 nucleoside substitutions, additions, or deletions. In some embodiments, the sense strand sequence comprises or consists of the sequence of SEQ ID NO: 6466, or a sense strand sequence thereof having 1 or 2 nucleoside substitutions, additions, or deletions. In some embodiments, the sense strand sequence comprises or consists of a sequence 100% identical to SEQ ID NO: 6466. The sense strand may comprise a modification pattern described herein. The sense strand may comprise an overhang. The sense strand may comprise a moiety such as a GalNAc moiety or a lipid moiety. In some embodiments, the siRNA comprises an antisense strand having a sequence in accordance with SEQ ID NO: 6525. In some embodiments, the antisense strand sequence comprises or consists of sequence at least 75% identical to SEQ ID NO: 6525, at least 80% identical to SEQ ID NO: 6525, at least 85% identical to SEQ ID NO: 6525, at least 90% identical to SEQ ID NO: 6525, or at least 95% identical to SEQ ID NO: 6525. In some embodiments, the antisense strand sequence comprises or consists of the sequence of SEQ ID NO 6525, or an antisense strand sequence thereof having 1, 2, 3, or 4 nucleoside substitutions, additions, or deletions. In some embodiments, the antisense strand sequence comprises or consists of the sequence of SEQ ID NO: 6525, or an antisense strand sequence thereof having 1 or 2 nucleoside substitutions, additions, or deletions. In some embodiments, the antisense strand sequence comprises or consists of a sequence 100% identical to SEQ ID NO: 6525. The antisense strand may comprise a modification pattern described herein. The antisense strand may comprise an overhang. The antisense strand may comprise a moiety such as a GalNAc moiety or a lipid moiety.

[0066] In some embodiments, the siRNA comprises a sense strand having a sequence in accordance with SEQ ID NO: 6470. In some embodiments, the sense strand sequence comprises or consists of sequence at least 75% identical to SEQ ID NO: 6470, at least 80% identical to SEQ ID NO: 6470, at least 85% identical to SEQ ID NO: 6470, at least 90% identical to SEQ ID NO: 6470, or at least 95% identical to SEQ ID NO: 6470. In some embodiments, the sense strand sequence comprises or consists of the sequence of SEQ ID NO 6470, or a sense strand sequence thereof having 1, 2, 3, or 4 nucleoside substitutions, additions, or deletions. In some embodiments, the sense strand sequence comprises or consists of the sequence of SEQ ID NO: 6470, or a sense strand sequence thereof having 1 or 2 nucleoside substitutions, additions, or deletions. In some embodiments, the sense strand sequence comprises or consists of a sequence 100% identical to SEQ ID NO: 6470. The sense strand may comprise a modification pattern described herein. The sense strand may comprise an overhang. The sense strand may comprise a moiety such as a GalNAc moiety or a lipid moiety. In some embodiments, the siRNA comprises an antisense strand having a sequence in accordance with SEQ ID NO: 6529. In some embodiments, the antisense strand sequence comprises or consists of sequence at least 75% identical to SEQ ID NO: 6529, at least 80% identical to SEQ ID NO: 6529, at least 85% identical to SEQ ID NO: 6529, at least 90% identical to SEQ ID NO: 6529, or at least 95% identical to SEQ ID NO: 6529. In some embodiments, the antisense strand sequence comprises or consists of the sequence of SEQ ID NO 6529, or an antisense strand sequence thereof having 1, 2, 3, or 4 nucleoside substitutions, additions, or deletions. In some embodiments, the antisense strand sequence comprises or consists of the sequence of SEQ ID NO: 6529, or an antisense strand sequence thereof having 1 or 2 nucleoside substitutions, additions, or deletions. In some embodiments, the antisense strand sequence comprises or consists of a sequence 100% identical to SEQ ID NO: 6529. The antisense strand may comprise a modification pattern described herein. The antisense strand may comprise an overhang. The antisense strand may comprise a moiety such as a GalNAc moiety or a lipid moiety.

[0067] In some embodiments, the siRNA comprises a sense strand having a sequence in accordance with SEQ ID NO: 6476. In some embodiments, the sense strand sequence comprises or consists of sequence at least 75% identical to SEQ ID NO: 6476, at least 80% identical to SEQ ID NO: 6476, at least 85% identical to SEQ ID NO: 6476, at least 90% identical to SEQ ID NO: 6476, or at least 95% identical to SEQ ID NO: 6476. In some embodiments, the sense strand sequence comprises or consists of the sequence of SEQ ID NO 6476, or a sense strand sequence thereof having 1, 2, 3, or 4 nucleoside substitutions, additions, or deletions. In some embodiments, the sense strand sequence comprises or consists of the sequence of SEQ ID NO: 6476, or a sense strand sequence thereof having 1 or 2 nucleoside substitutions, additions, or deletions. In some embodiments, the sense strand sequence comprises or consists of a sequence 100% identical to SEQ ID NO: 6476. The sense strand may comprise a modification pattern described herein. The sense strand may comprise an overhang. The sense strand may comprise a moiety such as a GalNAc moiety or a lipid moiety. In some embodiments, the siRNA comprises an antisense strand having a sequence in accordance with SEQ ID NO: 6535. In some embodiments, the antisense strand sequence comprises or consists of sequence at least 75% identical to SEQ ID NO: 6535, at least 80% identical to SEQ ID NO: 6535, at least 85% identical to SEQ ID NO: 6535, at least 90% identical to SEQ ID NO: 6535, or at least 95% identical to SEQ ID NO: 6535. In some embodiments, the antisense strand sequence comprises or consists of the sequence of SEQ ID NO 6535, or an antisense strand sequence thereof having 1, 2, 3, or 4 nucleoside substitutions, additions, or deletions. In some embodiments, the antisense strand sequence comprises or consists of the sequence of SEQ ID NO: 6535, or an antisense strand sequence thereof having 1 or 2 nucleoside substitutions, additions, or deletions. In some embodiments, the antisense strand sequence comprises or consists of a sequence 100% identical to SEQ ID NO: 6535. The antisense strand may comprise a modification pattern described herein. The antisense strand may comprise an overhang. The antisense strand may comprise a moiety such as a GalNAc moiety or a lipid moiety.

### B. ASOs

[0068] In some embodiments, the composition comprises an oligonucleotide that inhibits the expression of MST1, wherein the oligonucleotide comprises an antisense oligonucleotide (ASO). In some embodiments, the ASO is 12-30 nucleosides in length. In some embodiments, the ASO is 14-30 nucleosides in length. In some embodiments, the ASO is at least about 10, 11, 12, 13, 14, 15, 16, 17, 18, 19, 20, 21, 22, 23, 24, 25, 26, 27, 28, 29, or 30 nucleosides in length, or a range defined by any of the two aforementioned numbers. In some embodiments, the ASO is 15-25 nucleosides in length. In some embodiments, the ASO is 20 nucleosides in length.

[0069] In some embodiments, the composition comprises an oligonucleotide that inhibits the expression of MST1, wherein the oligonucleotide comprises an ASO about 12-30 nucleosides in length and comprising a nucleoside sequence complementary to about 12-30 contiguous nucleosides of a full-length human MST1 mRNA sequence such as SEQ ID NO: 6163; wherein (i) the oligonucleotide comprises a modification comprising a modified nucleoside and/or a modified internucleoside linkage, and/or (ii) the composition comprises a pharmaceutically acceptable carrier. In some embodiments, the ASO comprise a nucleoside sequence complementary to at least about 10, 11, 12, 13, 14, 15, 16, 17, 18, 19, 20, 21, 22, 23, 24, 25, 26, 27, 28, 29, 30, or more contiguous nucleosides of one of SEQ ID NO: 6163.

[0070] In some embodiments, the composition comprises an oligonucleotide that inhibits the expression of MST1, wherein the oligonucleotide comprises an ASO about 12-30 nucleosides in length and comprising a nucleoside sequence complementary to about 12-30 contiguous nucleosides of a full-length human MST1 mRNA sequence such as SEQ ID NO: 6185; wherein (i) the oligonucleotide comprises a modification comprising a modified nucleoside and/or a modified internucleoside linkage, and/or (ii) the composition comprises a pharmaceutically acceptable carrier. In some embodiments, the ASO comprise a nucleoside sequence complementary to at least about 10, 11, 12, 13, 14, 15, 16, 17, 18, 19, 20, 21, 22, 23, 24, 25, 26, 27, 28, 29, 30, or more contiguous nucleosides of one of SEQ ID NO: 6185.

### C. Modification Patterns

[0071] In some embodiments, the composition comprises an oligonucleotide that inhibits the expression of MST1, wherein the oligonucleotide comprises a modification comprising a modified nucleoside and/or a modified internucleoside linkage, and/or (ii) the composition comprises a pharmaceutically acceptable carrier. In some embodiments, the oligonucleotide comprises a modification comprising a modified nucleoside and/or a modified internucleoside linkage. In some embodiments, the oligonucleotide comprises a modified internucleoside linkage. In some embodiments, the modified internucleoside linkage comprises alkylphosphonate, phosphorothioate, methylphosphonate, phosphorodithioate, alkylphosphonothioate, phosphoramidate, carbamate, carbonate, phosphate triester, acetamidate, or carboxymethyl ester, or a combination thereof. In some embodiments, the modified internucleoside linkage comprises one or more phosphorothioate linkages. A phosphorothioate may include a nonbridging oxygen atom in a phosphate backbone of the oligonucleotide that is replaced by sulfur. Modified internucleoside linkages may be included in siRNAs or ASOs. Benefits of the modified internucleoside linkage may include decreased toxicity or improved pharmacokinetics.

[0072] In some embodiments, the composition comprises an oligonucleotide that inhibits the expression of MST1, wherein the oligonucleotide comprises a modified internucleoside linkage, wherein the oligonucleotide comprises 1, 2, 3, 4, 5, 6, 7, 8, 9, 10, 11, 12, 13, 14, 15, 16, 17, 18, 19, or 20 modified internucleoside linkages, or a range of modified internucleoside linkages defined by any two of the aforementioned numbers. In some embodiments, the oligonucleotide comprises no more than 18 modified internucleoside linkages. In some embodiments, the oligonucleotide comprises no more than 20 modified internucleoside linkages. In some embodiments, the oligonucleotide comprises 2 or more modified internucleoside linkages, 3 or more modified internucleoside linkages, 4 or more modified internucleoside linkages, 5 or more modified internucleoside linkages, 6 or more modified internucleoside linkages, 7 or more modified internucleoside linkages, 8 or more modified internucleoside linkages, 9 or more modified internucleoside linkages, 10 or more modified internucleoside linkages, 11 or more modified internucleoside linkages, 12 or more modified internucleoside linkages, 13 or more modified internucleoside linkages, 14 or more modified internucleoside linkages, 15 or more modified internucleoside linkages, 16 or more modified internucleoside linkages, 17 or more modified internucleoside linkages, 18 or more modified internucleoside linkages, 19 or more modified internucleoside linkages, or 20 or more modified internucleoside linkages.

[0073] In some embodiments, the composition comprises an oligonucleotide that inhibits the expression of MST1, wherein the oligonucleotide comprises the modified nucleoside. In some embodiments, the modified nucleoside comprises a locked nucleic acid (LNA), hexitol nucleic acid (HLA), cyclohexene nucleic acid (CeNA), 2′-methoxyethyl, 2′-O-alkyl, 2′-O-allyl, 2′-fluoro, or 2′-deoxy, or a combination thereof. In some embodiments, the modified nucleoside comprises a LNA. In some embodiments, the modified nucleoside comprises a 2′,4′ constrained ethyl nucleic acid. In some embodiments, the modified nucleoside comprises HLA. In some embodiments, the modified nucleoside comprises CeNA. In some embodiments, the modified nucleoside comprises a 2′-methoxyethyl group. In some embodiments, the modified nucleoside comprises a 2′-O-alkyl group. In some embodiments, the modified nucleoside comprises a 2′-O-allyl group. In some embodiments, the modified nucleoside comprises a 2′-fluoro group. In some embodiments, the modified nucleoside comprises a 2′-deoxy group. In some embodiments, the modified nucleoside comprises a 2′-O-methyl nucleoside, 2′-deoxyfluoro nucleoside, 2′-O—N-methylacetamido (2′-O-NMA) nucleoside, a 2′-O-dimethylaminoethoxyethyl (2′-O-DMAEOE) nucleoside, 2′-O-aminopropyl (2′-O-AP) nucleoside, or 2′-ara-F, or a combination thereof. In some embodiments, the modified nucleoside comprises a 2′-O-methyl nucleoside. In some embodiments, the modified nucleoside comprises a 2′-deoxyfluoro nucleoside. In some embodiments, the modified nucleoside comprises a 2′-O-NMA nucleoside. In some embodiments, the modified nucleoside comprises a 2′-O-DMAEOE nucleoside. In some embodiments, the modified nucleoside comprises a 2′-O-aminopropyl (2′-O-AP) nucleoside. In some embodiments, the modified nucleoside comprises 2′-ara-F. In some embodiments, the modified nucleoside comprises one or more 2′fluoro modified nucleosides. In some embodiments, the modified nucleoside comprises a 2′ O-alkyl modified nucleoside. Benefits of the modified nucleoside may include decreased toxicity or improved pharmacokinetics.

[0074] In some embodiments, the oligonucleotide comprises 1, 2, 3, 4, 5, 6, 7, 8, 9, 10, 11, 12, 13, 14, 15, 16, 17, 18, 19, 20, or 21 modified nucleosides, or a range of nucleosides defined by any two of the aforementioned numbers. In some embodiments, the oligonucleotide comprises no more than 19 modified nucleosides. In some embodiments, the oligonucleotide comprises no more than 21 modified nucleosides. In some embodiments, the oligonucleotide comprises 2 or more modified nucleosides, 3 or more modified nucleosides, 4 or more modified nucleosides, 5 or more modified nucleosides, 6 or more modified nucleosides, 7 or more modified nucleosides, 8 or more modified nucleosides, 9 or more modified nucleosides, 10 or more modified nucleosides, 11 or more modified nucleosides, 12 or more modified nucleosides, 13 or more modified nucleosides, 14 or more modified nucleosides, 15 or more modified nucleosides, 16 or more modified nucleosides, 17 or more modified nucleosides, 18 or more modified nucleosides, 19 or more modified nucleosides, 20 or more modified nucleosides, or 21 or more modified nucleosides.

[0075] In some embodiments, the composition comprises an oligonucleotide that inhibits the expression of MST1, wherein the oligonucleotide comprises a moiety attached at a 3′ or 5′ terminus of the oligonucleotide. Examples of moieties include an integrin targeting ligand, a hydrophobic moiety, a sugar moiety, or a combination thereof. In some embodiments, the oligonucleotide is an siRNA having a sense strand, and the moiety is attached to a 5′ end of the sense strand. In some embodiments, the oligonucleotide is an siRNA having a sense strand, and the moiety is attached to a 3′ end of the sense strand. In some embodiments, the oligonucleotide is an siRNA having an antisense strand, and the moiety is attached to a 5′ end of the antisense strand. In some embodiments, the oligonucleotide is an siRNA having an antisense strand, and the moiety is attached to a 3′ end of the antisense strand. In some embodiments, the oligonucleotide is an ASO, and the moiety is attached to a 5′ end of the ASO. In some embodiments, the oligonucleotide is an ASO, and the moiety is attached to a 3′ end of the ASO.

[0076] In some embodiments, the oligonucleotide is delivered to a cell or tissue by linking the oligonucleotide to a targeting group. In some embodiments, the targeting group includes a cell receptor ligand, such as an integrin targeting ligand. Integrins may include a family of transmembrane receptors that facilitate cell-extracellular matrix (ECM) adhesion. In some embodiments, the moiety includes an epithelial-specific integrin. Integrin alpha-v-beta-6 (αvβ6) bay be an example of an epithelial-specific integrin αvβ36 may be a receptor for an ECM protein or TGF-beta latency-associated peptide (LAP). Integrin αvβ36 may be expressed in a cell or tissue. Integrin αvβ36 may be expressed or upregulated in injured pulmonary epithelium.

[0077] In some embodiments, the oligonucleotide is linked to an integrin targeting ligand that has affinity for integrin αvβ36. An integrin targeting ligand may include a compound that has affinity for integrin αvβ36 or integrin alpha-v-beta-3 (αvβ33), may be useful as a ligand to facilitate targeting or delivery of the oligonucleotide to which it is attached to a particular cell type or tissue (e.g., to cells expressing integrin αvβ33 or αvβ36). In some embodiments, multiple integrin targeting ligands are linked to the oligonucleotide. In some embodiments, the oligonucleotide-integrin targeting ligand conjugates are selectively internalized by lung epithelial cells, either through receptor-mediated endocytosis or by other means.

[0078] Examples of targeting groups useful for delivering the oligonucleotide that include integrin targeting ligands may be based upon peptides or peptide mimics containing an arginine-glycine-aspartic acid (RGD) peptide. In some embodiments, the composition comprises an oligonucleotide that inhibits the expression of MST1, wherein the oligonucleotide comprises an RGD peptide. In some embodiments, the composition comprises an RGD peptide. In some embodiments, the composition comprises an RGD peptide derivative. In some embodiments, the RGD peptide is attached at a 3′ terminus of the oligonucleotide. In some embodiments, the RGD peptide is attached at a 5′ terminus of the oligonucleotide. In some embodiments, the composition comprises a sense strand, and the RGD peptide is attached to the sense strand (e.g. attached to a 5′ end of the sense strand, or attached to a 3′ end of the sense strand). In some embodiments, the composition comprises an antisense strand, and the RGD peptide is attached to the antisense strand (e.g. attached to a 5′ end of the antisense strand, or attached to a 3′ end of the antisense strand). In some embodiments, the composition comprises an RGD peptide attached at a 3′ or 5′ terminus of the oligonucleotide. In some embodiments, the oligonucleotide comprises an RGD peptide and a lipid attached at a 3′ or 5′ terminus of the oligonucleotide. The RGD peptide may be linear. The RGD peptide may be cyclic. An RGD peptide may include a D-amino acid. In some embodiments, the RGD peptide comprises Cyclo(-Arg-Gly-Asp-D-Phe-Cys) (SEQ ID NO: 6182). In some embodiments, the RGD peptide comprises Cyclo(-Arg-Gly-Asp-D-Phe-Lys) (SEQ ID NO: 6183). In some embodiments, the RGD peptide comprises Cyclo(-Arg-Gly-Asp-D-Phe-azido) (SEQ ID NO: 6184). In some embodiments, the RGD peptide comprises an amino benzoic acid derived RGD. In some embodiments, the RGD peptide comprises Cyclo(-Arg-Gly-Asp-D-Phe-Cys) (SEQ ID NO: 6182), Cyclo(-Arg-Gly-Asp-D-Phe-Lys) (SEQ ID NO: 6183), Cyclo(-Arg-Gly-Asp-D-Phe-azido) (SEQ ID NO: 6184), an amino benzoic acid derived RGD, or a combination thereof. In some embodiments, the RGD peptide comprises multiple of such RGD peptides. For example, the RGD peptide may include 2, 3, or 4 RGD peptides. Some embodiments include an arginine-glycine-glutamic acid peptide.

[0079] The oligonucleotide may include purines. Examples of purines include adenine (A) or guanine (G), or modified versions thereof. The oligonucleotide may include pyrimidines. Examples of pyrimidines include cytosine (C), thymine (T), or uracil (U), or modified versions thereof.

[0080] In some embodiments, purines of the oligonucleotide comprise 2′ fluoro modified purines. In some embodiments, purines of the oligonucleotide comprise 2′ methyl modified purines. In some embodiments, purines of the oligonucleotide comprise a mixture of 2′ fluoro and 2′ methyl modified purines. In some embodiments, all purines of the oligonucleotide comprise 2′ fluoro modified purines. In some embodiments, all purines of the oligonucleotide comprise 2′ methyl modified purines. In some embodiments, all purines of the oligonucleotide comprise a mixture of 2′ fluoro and 2′ methyl modified purines.

[0081] In some embodiments, pyrimidines of the oligonucleotide comprise 2′ fluoro modified pyrimidines. In some embodiments, pyrimidines of the oligonucleotide comprise 2′ methyl modified pyrimidines. In some embodiments, pyrimidines of the oligonucleotide comprise a mixture of 2′ fluoro and 2′ methyl modified pyrimidines. In some embodiments, all pyrimidines of the oligonucleotide comprise 2′ fluoro modified pyrimidines. In some embodiments, all pyrimidines of the oligonucleotide comprise 2′ methyl modified pyrimidines. In some embodiments, all pyrimidines of the oligonucleotide comprise a mixture of 2′ fluoro and 2′ methyl modified pyrimidines.

[0082] In some embodiments, purines of the oligonucleotide comprise 2′ fluoro modified purines, and pyrimidines of the oligonucleotide comprise a mixture of 2′ fluoro and 2′ methyl modified pyrimidines. In some embodiments, purines of the oligonucleotide comprise 2′ methyl modified purines, and pyrimidines of the oligonucleotide comprise a mixture of 2′ fluoro and 2′ methyl modified pyrimidines. In some embodiments, purines of the oligonucleotide comprise 2′ fluoro modified purines, and pyrimidines of the oligonucleotide comprise 2′ methyl modified pyrimidines. In some embodiments, purines of the oligonucleotide comprise 2′ methyl modified purines, and pyrimidines of the oligonucleotide comprise 2′ fluoro modified pyrimidines. In some embodiments, pyrimidines of the oligonucleotide comprise 2′ fluoro modified pyrimidines, and purines of the oligonucleotide comprise a mixture of 2′ fluoro and 2′ methyl modified purines. In some embodiments, pyrimidines of the oligonucleotide comprise 2′ methyl modified pyrimidines, and purines of the oligonucleotide comprise a mixture of 2′ fluoro and 2′ methyl modified purines. In some embodiments, pyrimidines of the oligonucleotide comprise 2′ fluoro modified pyrimidines, and purines of the oligonucleotide comprise 2′ methyl modified purines. In some embodiments, pyrimidines of the oligonucleotide comprise 2′ methyl modified pyrimidines, and purines of the oligonucleotide comprise 2′ fluoro modified purines.

[0083] In some embodiments, all purines of the oligonucleotide comprise 2′ fluoro modified purines, and all pyrimidines of the oligonucleotide comprise a mixture of 2′ fluoro and 2′ methyl modified pyrimidines. In some embodiments, all purines of the oligonucleotide comprise 2′ methyl modified purines, and all pyrimidines of the oligonucleotide comprise a mixture of 2′ fluoro and 2′ methyl modified pyrimidines. In some embodiments, all purines of the oligonucleotide comprise 2′ fluoro modified purines, and all pyrimidines of the oligonucleotide comprise 2′ methyl modified pyrimidines. In some embodiments, all purines of the oligonucleotide comprise 2′ methyl modified purines, and all pyrimidines of the oligonucleotide comprise 2′ fluoro modified pyrimidines. In some embodiments, all pyrimidines of the oligonucleotide comprise 2′ fluoro modified pyrimidines, and all purines of the oligonucleotide comprise a mixture of 2′ fluoro and 2′ methyl modified purines. In some embodiments, all pyrimidines of the oligonucleotide comprise 2′ methyl modified pyrimidines, and all purines of the oligonucleotide comprise a mixture of 2′ fluoro and 2′ methyl modified purines. In some embodiments, all pyrimidines of the oligonucleotide comprise 2′ fluoro modified pyrimidines, and all purines of the oligonucleotide comprise 2′ methyl modified purines. In some embodiments, all pyrimidines of the oligonucleotide comprise 2′ methyl modified pyrimidines, and all purines of the oligonucleotide comprise 2′ fluoro modified purines.

[0084] In some cases, the oligonucleotide comprises a particular modification pattern. In some embodiments, position 9 counting from the 5′ end of the of a strand of the oligonucleotide may have a 2′F modification. In some embodiments, when position 9 of a strand of the oligonucleotide is a pyrimidine, then all purines in a strand of the oligonucleotide have a 2′OMe modification. In some embodiments, when position 9 is the only pyrimidine between positions 5 and 11 of the sense stand, then position 9 is the only position with a 2′F modification in a strand of the oligonucleotide. In some embodiments, when position 9 and only one other base between positions 5 and 11 of a strand of the oligonucleotide are pyrimidines, then both of these pyrimidines are the only two positions with a 2′F modification in a strand of the oligonucleotide. In some embodiments, when position 9 and only two other bases between positions 5 and 11 of a strand of the oligonucleotide are pyrimidines, and those two other pyrimidines are in adjacent positions so that there would be not three 2′F modifications in a row, then any combination of 2′F modifications can be made that give three 2′F modifications in total. In some embodiments, when there are more than 2 pyrimidines between positions 5 and 11 of a strand of the oligonucleotide, then all combinations of pyrimidines having the 2′F modification are allowed that have three to five 2′F modifications in total, provided that a strand of the oligonucleotide does not have three 2′F modifications in a row. In some cases, a strand of the oligonucleotide of any of the siRNAs comprises a modification pattern which conforms to any or all of these a strand of the oligonucleotide rules.

[0085] In some embodiments, when position 9 of a strand of the oligonucleotide is a purine, then all purines in a strand of the oligonucleotide have a 2′OMe modification. In some embodiments, when position 9 is the only purine between positions 5 and 11 of the sense stand, then position 9 is the only position with a 2′F modification in a strand of the oligonucleotide. In some embodiments, when position 9 and only one other base between positions 5 and 11 of a strand of the oligonucleotide are purines, then both of these purines are the only two positions with a 2′F modification in a strand of the oligonucleotide. In some embodiments, when position 9 and only two other bases between positions 5 and 11 of a strand of the oligonucleotide are purines, and those two other purines are in adjacent positions so that there would be not three 2′F modifications in a row, then any combination of 2′F modifications can be made that give three 2′F modifications in total. In some embodiments, when there are more than 2 purines between positions 5 and 11 of a strand of the oligonucleotide, then all combinations of purines having the 2′F modification are allowed that have three to five 2′F modifications in total, provided that a strand of the oligonucleotide does not have three 2′F modifications in a row. In some cases, a strand of the oligonucleotide of any of the siRNAs comprises a modification pattern which conforms to any or all of these a strand of the oligonucleotide rules.

[0086] In some cases, position 9 of a strand of the oligonucleotide can be a 2′deoxy. In these cases, 2′F and 2′OMe modifications may occur at the other positions of a strand of the oligonucleotide. In some cases, a strand of the oligonucleotide of any of the siRNAs comprises a modification pattern which conforms to these a strand of the oligonucleotide rules.

[0087] In some embodiments, position nine of the sense strand comprises a 2′ fluoro-modified pyrimidine. In some embodiments, all purines of the sense strand comprise 2′-O-methyl modified purines. In some embodiments, 1, 2, 3, 4, or 5 pyrimidines between positions 5 and 11 comprise a 2′fluoro-modified pyrimidine, provided there are not three 2′ fluoro-modified pyrimidines in a row. In some embodiments, the odd-numbered positions of the antisense strand comprise 2′-O-methyl modified nucleotides. In some embodiments, the even-numbered positions of the antisense strand comprise 2′fluoro-modified nucleotides and unmodified deoxyribonucleotide. In some embodiments, the even-numbered positions of the antisense strand comprise 2′fluoro-modified nucleotides, 2′-O-methyl modified nucleotides and unmodified deoxyribonucleotide. In some embodiments, position nine of the sense strand comprises a 2′ fluoro-modified pyrimidine; all purines of the sense strand comprises 2′-O-methyl modified purines; 1, 2, 3, 4, or 5 pyrimidines between positions 5 and 11 comprise a 2′fluoro-modified pyrimidine, provided there are not three 2′ fluoro-modified pyrimidines in a row; the odd-numbered positions of the antisense strand comprise 2′-O-methyl modified nucleotides; and the even-numbered positions of the antisense strand comprise 2′fluoro-modified nucleotides and unmodified deoxyribonucleotides.

[0088] In some embodiments, position nine of the sense strand comprises a 2′ fluoro-modified purine. In some embodiments, all pyrimidines of the sense strand comprise 2′-O-methyl modified purines. In some embodiments, 1, 2, 3, 4, or 5 purines between positions 5 and 11 comprise a 2′fluoro-modified purine, provided there are not three 2′ fluoro-modified purine in a row. In some embodiments, the odd-numbered positions of the antisense strand comprise 2′-O-methyl modified nucleotides. In some embodiments, the even-numbered positions of the antisense strand comprise 2′fluoro-modified nucleotides and unmodified deoxyribonucleotide. In some embodiments, the even-numbered positions of the antisense strand comprise 2′fluoro-modified nucleotides, 2′-O-methyl modified nucleotides and unmodified deoxyribonucleotide. In some embodiments, position nine of the sense strand comprises a 2′ fluoro-modified purine; all pyrimidine of the sense strand comprises 2′-O-methyl modified pyrimidines; 1, 2, 3, 4, or 5 purines between positions 5 and 11 comprise a 2′fluoro-modified purines, provided there are not three 2′ fluoro-modified purines in a row; the odd-numbered positions of the antisense strand comprise 2′-O-methyl modified nucleotides; and the even-numbered positions of the antisense strand comprise 2′fluoro-modified nucleotides and unmodified deoxyribonucleotides. In some embodiments, there are not three 2′ fluoro-modified purines in a row. In some embodiments, there are not three 2′ fluoro-modified pyrimidines in a row.

[0089] In some embodiments, position nine of the sense strand comprises an unmodified deoxyribonucleotide. In some embodiments, positions 5, 7, and 8 of the sense strand comprise 2′fluoro-modified nucleotides. In some embodiments, all pyrimidines in positions 10 to 21 of the sense strand comprise 2′-O-methyl modified pyrimidines and all purines in positions 10 to 21 of the comprise 2′-O-methyl modified purines or 2′fluoro-modified purines. In some embodiments, the odd-numbered positions of the antisense strand comprise 2′-O-methyl modified nucleotides. In some embodiments, the even-numbered positions of the antisense strand comprise 2′fluoro-modified nucleotides and unmodified deoxyribonucleotides. In some embodiments, the even-numbered positions of the antisense strand comprise 2′fluoro-modified nucleotides, 2′-O-methyl modified nucleotides and unmodified deoxyribonucleotides. In some embodiments, position nine of the sense strand comprises an unmodified deoxyribonucleotide; positions 5, 7, and 8 of the sense strand comprise 2′fluoro-modified nucleotides; all pyrimidines in positions 10 to 21 of the sense strand comprise 2′-O-methyl modified pyrimidines and all purines in positions 10 to 21 of the comprise 2′-O-methyl modified purines or 2′fluoro-modified purines; the odd-numbered positions of the antisense strand comprise 2′-O-methyl modified nucleotides; and the even-numbered positions of the antisense strand comprise 2′fluoro-modified nucleotides and unmodified deoxyribonucleotides.

[0090] In some embodiments, position nine of the sense strand comprises an unmodified deoxyribonucleotide. In some embodiments, positions 5, 7, and 8 of the sense strand comprise 2′fluoro-modified nucleotides. In some embodiments, all purines in positions 10 to 21 of the sense strand comprise 2′-O-methyl modified purines and all pyrimidines in positions 10 to 21 of the comprise 2′-O-methyl modified pyrimidines or 2′fluoro-modified pyrimidines. In some embodiments, the odd-numbered positions of the antisense strand comprise 2′-O-methyl modified nucleotides. In some embodiments, the even-numbered positions of the antisense strand comprise 2′fluoro-modified nucleotides and unmodified deoxyribonucleotides. In some embodiments, the even-numbered positions of the antisense strand comprise 2′fluoro-modified nucleotides, 2′-O-methyl modified nucleotides and unmodified deoxyribonucleotides. In some embodiments, position nine of the sense strand comprises an unmodified deoxyribonucleotide; positions 5, 7, and 8 of the sense strand comprise 2′fluoro-modified nucleotides; all purines in positions 10 to 21 of the sense strand comprise 2′-O-methyl modified purines and all pyrimidines in positions 10 to 21 of the comprise 2′-O-methyl modified pyrimidines or 2′fluoro-modified pyrimidines; the odd-numbered positions of the antisense strand comprise 2′-O-methyl modified nucleotides; and the even-numbered positions of the antisense strand comprise 2′fluoro-modified nucleotides and unmodified deoxyribonucleotide.

[0091] In some embodiments, the moiety includes a negatively charged group attached at a 5′ end of the oligonucleotide. This may be referred to as a 5′-end group. In some embodiments, the negatively charged group is attached at a 5′ end of an antisense strand of an siRNA disclosed herein. The 5′-end group may be or include a 5′-end phosphorothioate, 5′-end phosphorodithioate, 5′-end vinylphosphonate (5′-VP), 5′-end methylphosphonate, 5′-end cyclopropyl phosphonate, or a 5′-deoxy-5′-C-malonyl. The 5′-end group may comprise 5′-VP. In some embodiments, the 5′-VP comprises a trans-vinylphosphate or cis-vinylphosphate. The 5′-end group may include an extra 5′ phosphate. A combination of 5′-end groups may be used.

[0092] In some embodiments, the oligonucleotide includes a negatively charged group. The negatively charged group may aid in cell or tissue penetration. The negatively charged group may be attached at a 5′ or 3′ end (e.g. a 5′ end) of the oligonucleotide. This may be referred to as an end group. The end group may be or include a phosphorothioate, phosphorodithioate, vinylphosphonate, methylphosphonate, cyclopropyl phosphonate, or a deoxy-C-malonyl. The end group may include an extra 5′ phosphate such as an extra 5′ phosphate. A combination of end groups may be used.

[0093] In some embodiments, the oligonucleotide includes a phosphate mimic. In some embodiments, the phosphate mimic comprises vinyl phosphonate. In some embodiments, the vinyl phosphonate comprises a trans-vinylphosphate. In some embodiments, the vinyl phosphonate comprises a cis-vinylphosphate. An example of a nucleotide that includes a vinyl phosphonate is shown below.

[chemical structure]

[0094] In some embodiments, the vinyl phosphonate increases the stability of the oligonucleotide. In some embodiments, the vinyl phosphonate increases the accumulation of the oligonucleotide in tissues. In some embodiments, the vinyl phosphonate protects the oligonucleotide from an exonuclease or a phosphatase. In some embodiments, the vinyl phosphonate improves the binding affinity of the oligonucleotide with the siRNA processing machinery.

[0095] In some embodiments, the oligonucleotide includes 1 vinyl phosphonate. In some embodiments, the oligonucleotide includes 2 vinyl phosphonates. In some embodiments, the oligonucleotide includes 3 vinyl phosphonates. In some embodiments, the oligonucleotide includes 4 vinyl phosphonates. In some embodiments, the antisense strand of the oligonucleotide comprises a vinyl phosphonate at the 5′ end. In some embodiments, the antisense strand of the oligonucleotide comprises a vinyl phosphonate at the 3′ end. In some embodiments, the sense strand of the oligonucleotide comprises a vinyl phosphonate at the 5′ end. In some embodiments, the sense strand of the oligonucleotide comprises a vinyl phosphonate at the 3′ end.

[0096] In some embodiments, the composition comprises an oligonucleotide that inhibits the expression of MST1, wherein the oligonucleotide comprises an siRNA comprising a sense strand and an antisense strand, wherein the sense strand comprises a nucleoside sequence comprising or consisting of the sequence of any one of SEQ ID NOs: 6049-6086, 6125-6162, or 6186-6242, or a nucleic acid sequence thereof having 1 or 2 nucleoside substitutions, additions, or deletions. In some embodiments, the sense strand comprises a nucleoside sequence comprising or consisting of the sequence of any one of SEQ ID NOs: 6049-6086, 6125-6162, or 6186-6242, or a nucleic acid sequence thereof having 3 or 4 nucleoside substitutions, additions, or deletions. In some embodiments, the sense strand further comprises a 3′ overhang. In some embodiments, the 3′ overhang comprises 1, 2, 3, 4, 5, 6, 7, 8, 9, or 10 nucleosides, or a range of nucleotides defined by any two of the aforementioned numbers. In some embodiments, the 3′ overhang comprises 1, 2, or more nucleosides. In some embodiments, the 3′ overhang comprises 2 nucleosides. In some embodiments, the sense strand further comprises a 5′ overhang. In some embodiments, the 5′ overhang comprises 1, 2, 3, 4, 5, 6, 7, 8, 9, or 10 nucleosides, or a range of nucleotides defined by any two of the aforementioned numbers. In some embodiments, the 5′ overhang comprises 1, 2, or more nucleosides. In some embodiments, the 5′ overhang comprises 2 nucleosides. In some embodiments, the sense strand comprises a nucleoside sequence comprising or consisting of the sequence of any one of SEQ ID NOs: 6049-6086, 6125-6162, or 6186-6242, or a nucleic acid sequence thereof having 1 or 2 nucleoside additions at the 3′ end. In some embodiments, the composition comprises an oligonucleotide that inhibits the expression of MST1, wherein the oligonucleotide comprises an siRNA comprising a sense strand and an antisense strand, wherein the sense strand comprises a nucleoside sequence comprising or consisting of the sequence of any one of SEQ ID NOs: 6049-6086, 6125-6162, or 6186-6242. The sense strand or antisense strand may comprise any modifications described herein. The sense strand or antisense strand may comprise a lipid moiety or a GalNAc moiety.

[0097] In some embodiments, the composition comprises an oligonucleotide that inhibits the expression of MST1, wherein the oligonucleotide comprises an siRNA comprising a sense strand and an antisense strand, wherein the antisense strand comprises a nucleoside sequence comprising or consisting of the sequence of any one of SEQ ID NOs: 6087-6124 or 6253-6309, or a nucleic acid sequence thereof having 1 or 2 nucleoside substitutions, additions, or deletions. In some embodiments, the antisense strand sequence comprises a nucleoside sequence comprising or consisting of the sequence of any one of SEQ ID NOs: 6087-6124 or 6253-6309, or a nucleic acid sequence thereof having 3 or 4 nucleoside substitutions, additions, or deletions. In some embodiments, the antisense strand further comprises a 3′ overhang. In some embodiments, the 3′ overhang comprises 1, 2, 3, 4, 5, 6, 7, 8, 9, or 10 nucleosides, or a range of nucleotides defined by any two of the aforementioned numbers. In some embodiments, the 3′ overhang comprises 1, 2, or more nucleosides. In some embodiments, the 3′ overhang comprises 2 nucleosides. In some embodiments, the antisense strand further comprises a 5′ overhang. In some embodiments, the 5′ overhang comprises 1, 2, 3, 4, 5, 6, 7, 8, 9, or 10 nucleosides, or a range of nucleotides defined by any two of the aforementioned numbers. In some embodiments, the 5′ overhang comprises 1, 2, or more nucleosides. In some embodiments, the 5′ overhang comprises 2 nucleosides. In some embodiments, the antisense strand comprises a nucleoside sequence comprising or consisting of the sequence of any one of SEQ ID NOs: 6087-6124 or 6253-6309, or a nucleic acid sequence thereof having 1 or 2 nucleoside additions at the 3′ end. In some embodiments, the composition comprises an oligonucleotide that inhibits the expression of MST1, wherein the oligonucleotide comprises an siRNA comprising a sense strand and an antisense strand, wherein the antisense strand comprises a nucleoside sequence comprising or consisting of the sequence of any one of SEQ ID NOs: 6087-6124 or 6253-6309. The sense strand or antisense strand may comprise any modifications described herein. The sense strand or antisense strand may comprise a lipid moiety or a GalNAc moiety.

[0098] In some embodiments, the siRNA comprises a sense strand having a sequence in accordance with any of SEQ ID NOs: 6206, 6212, 6213, 6214, 6227, 6232, 6236, or 6242. In some embodiments, the sense strand sequence comprises or consists of sequence at least 75% identical to any one of SEQ ID NOs: 6206, 6212, 6213, 6214, 6227, 6232, 6236, or 6242, at least 80% identical to any one of SEQ ID NOs: 6206, 6212, 6213, 6214, 6227, 6232, 6236, or 6242, at least 85% identical to of any one of SEQ ID NOs: 6206, 6212, 6213, 6214, 6227, 6232, 6236, or 6242, at least 90% identical to any one of SEQ ID NOs: 6206, 6212, 6213, 6214, 6227, 6232, 6236, or 6242, or at least 95% identical to any one of SEQ ID NOs: 6206, 6212, 6213, 6214, 6227, 6232, 6236, or 6242. In some embodiments, the sense strand sequence comprises or consists of the sequence of any one of SEQ ID NOs 6206, 6212, 6213, 6214, 6227, 6232, 6236, or 6242, or a sense strand sequence thereof having 1, 2, 3, or 4 nucleoside substitutions, additions, or deletions. In some embodiments, the sense strand sequence comprises or consists of the sequence of any one of SEQ ID NOs: 6206, 6212, 6213, 6214, 6227, 6232, 6236, or 6242, or a sense strand sequence thereof having 1 or 2 nucleoside substitutions, additions, or deletions. In some embodiments, the sense strand sequence comprises or consists of a sequence 100% identical to SEQ ID NOs: 6206, 6212, 6213, 6214, 6227, 6232, 6236, or 6242. The sense strand sequence may include the first 5, 6, 7, 8, 9, 10, 11, 12, 13, 14, 15, 16, 17, 18, or 19 nucleotides (in the 5′ to 3′ direction) of any of the aforementioned sequences. The sense strand sequence may include the last 5, 6, 7, 8, 9, 10, 11, 12, 13, 14, 15, 16, 17, 18, or 19 nucleotides (in the 5′ to 3′ direction) of any of the aforementioned sequences. The sense strand may comprise a modification pattern described herein. The sense strand may comprise an overhang. The sense strand may comprise a lipid moiety. The sense strand may comprise a GalNAc moiety.

[0099] In some embodiments, the siRNA comprises an antisense strand having a sequence in accordance with any of SEQ ID NOs: 6273, 6279, 6280, 6281, 6294, 6299, 6303, or 6309. In some embodiments, the antisense strand sequence comprises or consists of sequence at least 75% identical to any one of SEQ ID NOs: 6273, 6279, 6280, 6281, 6294, 6299, 6303, or 6309, at least 80% identical to any one of SEQ ID NOs: 6273, 6279, 6280, 6281, 6294, 6299, 6303, or 6309, at least 85% identical to of any one of SEQ ID NOs: 6273, 6279, 6280, 6281, 6294, 6299, 6303, or 6309, at least 90% identical to any one of SEQ ID NOs: 6273, 6279, 6280, 6281, 6294, 6299, 6303, or 6309, or at least 95% identical to any one of SEQ ID NOs: 6273, 6279, 6280, 6281, 6294, 6299, 6303, or 6309. In some embodiments, the antisense strand sequence comprises or consists of the sequence of any one of SEQ ID NOs: 6273, 6279, 6280, 6281, 6294, 6299, 6303, or 6309, or an antisense strand sequence thereof having 1, 2, 3, or 4 nucleoside substitutions, additions, or deletions. In some embodiments, the antisense strand sequence comprises or consists of the sequence of any one of SEQ ID NOs: 6273, 6279, 6280, 6281, 6294, 6299, 6303, or 6309, or an antisense strand sequence thereof having 1 or 2 nucleoside substitutions, additions, or deletions. In some embodiments, the antisense strand sequence comprises or consists of a sequence 100% identical to SEQ ID NOs: 6273, 6279, 6280, 6281, 6294, 6299, 6303, or 6309. The antisense strand sequence may include the first 5, 6, 7, 8, 9, 10, 11, 12, 13, 14, 15, 16, 17, 18, or 19 nucleotides (in the 5′ to 3′ direction) of any of the aforementioned sequences. The antisense strand sequence may include the last 5, 6, 7, 8, 9, 10, 11, 12, 13, 14, 15, 16, 17, 18, or 19 nucleotides (in the 5′ to 3′ direction) of any of the aforementioned sequences. The antisense strand may comprise an overhang. The antisense strand may comprise a modification pattern described herein. The antisense strand may comprise a lipid moiety or a GalNAc moiety.

[0100] In some embodiments, the siRNA comprises a sense strand having a sequence in accordance with SEQ ID NO: 6206. In some embodiments, the sense strand sequence comprises or consists of sequence at least 75% identical to SEQ ID NO: 6206, at least 80% identical to SEQ ID NO: 6206, at least 85% identical to SEQ ID NO: 6206, at least 90% identical to SEQ ID NO: 6206, or at least 95% identical to SEQ ID NO: 6206. In some embodiments, the sense strand sequence comprises or consists of the sequence of SEQ ID NO 6206, or a sense strand sequence thereof having 1, 2, 3, or 4 nucleoside substitutions, additions, or deletions. In some embodiments, the sense strand sequence comprises or consists of the sequence of SEQ ID NO: 6206, or a sense strand sequence thereof having 1 or 2 nucleoside substitutions, additions, or deletions. In some embodiments, the sense strand sequence comprises or consists of a sequence 100% identical to SEQ ID NO: 6206. The sense strand may comprise a modification pattern described herein. The sense strand may comprise an overhang. The sense strand may comprise a lipid moiety. The sense strand may comprise a GalNAc moiety.

[0101] In some embodiments, the siRNA comprises a sense strand having a sequence in accordance with SEQ ID NO: 6212. In some embodiments, the sense strand sequence comprises or consists of sequence at least 75% identical to SEQ ID NO: 6212, at least 80% identical to SEQ ID NO: 6212, at least 85% identical to SEQ ID NO: 6212, at least 90% identical to SEQ ID NO: 6212, or at least 95% identical to SEQ ID NO: 6212. In some embodiments, the sense strand sequence comprises or consists of the sequence of SEQ ID NO 6212, or a sense strand sequence thereof having 1, 2, 3, or 4 nucleoside substitutions, additions, or deletions. In some embodiments, the sense strand sequence comprises or consists of the sequence of SEQ ID NO: 6212, or a sense strand sequence thereof having 1 or 2 nucleoside substitutions, additions, or deletions. In some embodiments, the sense strand sequence comprises or consists of a sequence 100% identical to SEQ ID NO: 6212. The sense strand may comprise a modification pattern described herein. The sense strand may comprise an overhang. The sense strand may comprise a lipid moiety. The sense strand may comprise a GalNAc moiety.

[0102] In some embodiments, the siRNA comprises a sense strand having a sequence in accordance with SEQ ID NO: 6213. In some embodiments, the sense strand sequence comprises or consists of sequence at least 75% identical to SEQ ID NO: 6213, at least 80% identical to SEQ ID NO: 6213, at least 85% identical to SEQ ID NO: 6213, at least 90% identical to SEQ ID NO: 6213, or at least 95% identical to SEQ ID NO: 6213. In some embodiments, the sense strand sequence comprises or consists of the sequence of SEQ ID NO 6213, or a sense strand sequence thereof having 1, 2, 3, or 4 nucleoside substitutions, additions, or deletions. In some embodiments, the sense strand sequence comprises or consists of the sequence of SEQ ID NO: 6213, or a sense strand sequence thereof having 1 or 2 nucleoside substitutions, additions, or deletions. In some embodiments, the sense strand sequence comprises or consists of a sequence 100% identical to SEQ ID NO: 6213. The sense strand may comprise a modification pattern described herein. The sense strand may comprise an overhang. The sense strand may comprise a lipid moiety. The sense strand may comprise a GalNAc moiety.

[0103] In some embodiments, the siRNA comprises a sense strand having a sequence in accordance with SEQ ID NO: 6214. In some embodiments, the sense strand sequence comprises or consists of sequence at least 75% identical to SEQ ID NO: 6214, at least 80% identical to SEQ ID NO: 6214, at least 85% identical to SEQ ID NO: 6214, at least 90% identical to SEQ ID NO: 6214, or at least 95% identical to SEQ ID NO: 6214. In some embodiments, the sense strand sequence comprises or consists of the sequence of SEQ ID NO 6214, or a sense strand sequence thereof having 1, 2, 3, or 4 nucleoside substitutions, additions, or deletions. In some embodiments, the sense strand sequence comprises or consists of the sequence of SEQ ID NO: 6214, or a sense strand sequence thereof having 1 or 2 nucleoside substitutions, additions, or deletions. In some embodiments, the sense strand sequence comprises or consists of a sequence 100% identical to SEQ ID NO: 6214. The sense strand may comprise a modification pattern described herein. The sense strand may comprise an overhang. The sense strand may comprise a lipid moiety. The sense strand may comprise a GalNAc moiety.

[0104] In some embodiments, the siRNA comprises a sense strand having a sequence in accordance with SEQ ID NO: 6227. In some embodiments, the sense strand sequence comprises or consists of sequence at least 75% identical to SEQ ID NO: 6227, at least 80% identical to SEQ ID NO: 6227, at least 85% identical to SEQ ID NO: 6227, at least 90% identical to SEQ ID NO: 6227, or at least 95% identical to SEQ ID NO: 6227. In some embodiments, the sense strand sequence comprises or consists of the sequence of SEQ ID NO 6227, or a sense strand sequence thereof having 1, 2, 3, or 4 nucleoside substitutions, additions, or deletions. In some embodiments, the sense strand sequence comprises or consists of the sequence of SEQ ID NO: 6227, or a sense strand sequence thereof having 1 or 2 nucleoside substitutions, additions, or deletions. In some embodiments, the sense strand sequence comprises or consists of a sequence 100% identical to SEQ ID NO: 6227. The sense strand may comprise a modification pattern described herein. The sense strand may comprise an overhang. The sense strand may comprise a lipid moiety. The sense strand may comprise a GalNAc moiety.

[0105] In some embodiments, the siRNA comprises a sense strand having a sequence in accordance with SEQ ID NO: 6232. In some embodiments, the sense strand sequence comprises or consists of sequence at least 75% identical to SEQ ID NO: 6232, at least 80% identical to SEQ ID NO: 6232, at least 85% identical to SEQ ID NO: 6232, at least 90% identical to SEQ ID NO: 6232, or at least 95% identical to SEQ ID NO: 6232. In some embodiments, the sense strand sequence comprises or consists of the sequence of SEQ ID NO 6232, or a sense strand sequence thereof having 1, 2, 3, or 4 nucleoside substitutions, additions, or deletions. In some embodiments, the sense strand sequence comprises or consists of the sequence of SEQ ID NO: 6232, or a sense strand sequence thereof having 1 or 2 nucleoside substitutions, additions, or deletions. In some embodiments, the sense strand sequence comprises or consists of a sequence 100% identical to SEQ ID NO: 6232. The sense strand may comprise a modification pattern described herein. The sense strand may comprise an overhang. The sense strand may comprise a lipid moiety. The sense strand may comprise a GalNAc moiety.

[0106] In some embodiments, the siRNA comprises a sense strand having a sequence in accordance with SEQ ID NO: 6236. In some embodiments, the sense strand sequence comprises or consists of sequence at least 75% identical to SEQ ID NO: 6236, at least 80% identical to SEQ ID NO: 6236, at least 85% identical to SEQ ID NO: 6236, at least 90% identical to SEQ ID NO: 6236, or at least 95% identical to SEQ ID NO: 6236. In some embodiments, the sense strand sequence comprises or consists of the sequence of SEQ ID NO 6236, or a sense strand sequence thereof having 1, 2, 3, or 4 nucleoside substitutions, additions, or deletions. In some embodiments, the sense strand sequence comprises or consists of the sequence of SEQ ID NO: 6236, or a sense strand sequence thereof having 1 or 2 nucleoside substitutions, additions, or deletions. In some embodiments, the sense strand sequence comprises or consists of a sequence 100% identical to SEQ ID NO: 6236. The sense strand may comprise a modification pattern described herein. The sense strand may comprise an overhang. The sense strand may comprise a lipid moiety. The sense strand may comprise a GalNAc moiety.

[0107] In some embodiments, the siRNA comprises a sense strand having a sequence in accordance with SEQ ID NO: 6242. In some embodiments, the sense strand sequence comprises or consists of sequence at least 75% identical to SEQ ID NO: 6242, at least 80% identical to SEQ ID NO: 6242, at least 85% identical to SEQ ID NO: 6242, at least 90% identical to SEQ ID NO: 6242, or at least 95% identical to SEQ ID NO: 6242. In some embodiments, the sense strand sequence comprises or consists of the sequence of SEQ ID NO 6242, or a sense strand sequence thereof having 1, 2, 3, or 4 nucleoside substitutions, additions, or deletions. In some embodiments, the sense strand sequence comprises or consists of the sequence of SEQ ID NO: 6242, or a sense strand sequence thereof having 1 or 2 nucleoside substitutions, additions, or deletions. In some embodiments, the sense strand sequence comprises or consists of a sequence 100% identical to SEQ ID NO: 6242. The sense strand may comprise a modification pattern described herein. The sense strand may comprise an overhang. The sense strand may comprise a lipid moiety. The sense strand may comprise a GalNAc moiety.

[0108] In some embodiments, the siRNA comprises an antisense strand having a sequence in accordance with SEQ ID NO: 6273. In some embodiments, the antisense strand sequence comprises or consists of sequence at least 75% identical to SEQ ID NO: 6273, at least 80% identical to SEQ ID NO: 6273, at least 85% identical to SEQ ID NO: 6273, at least 90% identical to SEQ ID NO: 6273, or at least 95% identical to SEQ ID NO: 6273. In some embodiments, the antisense strand sequence comprises or consists of the sequence of SEQ ID NO 6273, or an antisense strand sequence thereof having 1, 2, 3, or 4 nucleoside substitutions, additions, or deletions. In some embodiments, the antisense strand sequence comprises or consists of the sequence of SEQ ID NO: 6273, or an antisense strand sequence thereof having 1 or 2 nucleoside substitutions, additions, or deletions. In some embodiments, the antisense strand sequence comprises or consists of a sequence 100% identical to SEQ ID NO: 6273. The antisense strand may comprise a modification pattern described herein. The antisense strand may comprise an overhang. The antisense strand may comprise a lipid moiety. The antisense strand may comprise a GalNAc moiety.

[0109] In some embodiments, the siRNA comprises an antisense strand having a sequence in accordance with SEQ ID NO: 6279. In some embodiments, the antisense strand sequence comprises or consists of sequence at least 75% identical to SEQ ID NO: 6279, at least 80% identical to SEQ ID NO: 6279, at least 85% identical to SEQ ID NO: 6279, at least 90% identical to SEQ ID NO: 6279, or at least 95% identical to SEQ ID NO: 6279. In some embodiments, the antisense strand sequence comprises or consists of the sequence of SEQ ID NO 6279, or an antisense strand sequence thereof having 1, 2, 3, or 4 nucleoside substitutions, additions, or deletions. In some embodiments, the antisense strand sequence comprises or consists of the sequence of SEQ ID NO: 6279, or an antisense strand sequence thereof having 1 or 2 nucleoside substitutions, additions, or deletions. In some embodiments, the antisense strand sequence comprises or consists of a sequence 100% identical to SEQ ID NO: 6279. The antisense strand may comprise a modification pattern described herein. The antisense strand may comprise an overhang. The antisense strand may comprise a lipid moiety. The antisense strand may comprise a GalNAc moiety.

[0110] In some embodiments, the siRNA comprises an antisense strand having a sequence in accordance with SEQ ID NO: 6280. In some embodiments, the antisense strand sequence comprises or consists of sequence at least 75% identical to SEQ ID NO: 6280, at least 80% identical to SEQ ID NO: 6280, at least 85% identical to SEQ ID NO: 6280, at least 90% identical to SEQ ID NO: 6280, or at least 95% identical to SEQ ID NO: 6280. In some embodiments, the antisense strand sequence comprises or consists of the sequence of SEQ ID NO 6280, or an antisense strand sequence thereof having 1, 2, 3, or 4 nucleoside substitutions, additions, or deletions. In some embodiments, the antisense strand sequence comprises or consists of the sequence of SEQ ID NO: 6280, or an antisense strand sequence thereof having 1 or 2 nucleoside substitutions, additions, or deletions. In some embodiments, the antisense strand sequence comprises or consists of a sequence 100% identical to SEQ ID NO: 6280. The antisense strand may comprise a modification pattern described herein. The antisense strand may comprise an overhang. The antisense strand may comprise a lipid moiety. The antisense strand may comprise a GalNAc moiety.

[0111] In some embodiments, the siRNA comprises an antisense strand having a sequence in accordance with SEQ ID NO: 6281. In some embodiments, the antisense strand sequence comprises or consists of sequence at least 75% identical to SEQ ID NO: 6281, at least 80% identical to SEQ ID NO: 6281, at least 85% identical to SEQ ID NO: 6281, at least 90% identical to SEQ ID NO: 6281, or at least 95% identical to SEQ ID NO: 6281. In some embodiments, the antisense strand sequence comprises or consists of the sequence of SEQ ID NO 6281, or an antisense strand sequence thereof having 1, 2, 3, or 4 nucleoside substitutions, additions, or deletions. In some embodiments, the antisense strand sequence comprises or consists of the sequence of SEQ ID NO: 6281, or an antisense strand sequence thereof having 1 or 2 nucleoside substitutions, additions, or deletions. In some embodiments, the antisense strand sequence comprises or consists of a sequence 100% identical to SEQ ID NO: 6281. The antisense strand may comprise a modification pattern described herein. The antisense strand may comprise an overhang. The antisense strand may comprise a lipid moiety. The antisense strand may comprise a GalNAc moiety.

[0112] In some embodiments, the siRNA comprises an antisense strand having a sequence in accordance with SEQ ID NO: 6294. In some embodiments, the antisense strand sequence comprises or consists of sequence at least 75% identical to SEQ ID NO: 6294, at least 80% identical to SEQ ID NO: 6294, at least 85% identical to SEQ ID NO: 6294, at least 90% identical to SEQ ID NO: 6294, or at least 95% identical to SEQ ID NO: 6294. In some embodiments, the antisense strand sequence comprises or consists of the sequence of SEQ ID NO 6294, or an antisense strand sequence thereof having 1, 2, 3, or 4 nucleoside substitutions, additions, or deletions. In some embodiments, the antisense strand sequence comprises or consists of the sequence of SEQ ID NO: 6294, or an antisense strand sequence thereof having 1 or 2 nucleoside substitutions, additions, or deletions. In some embodiments, the antisense strand sequence comprises or consists of a sequence 100% identical to SEQ ID NO: 6294. The antisense strand may comprise a modification pattern described herein. The antisense strand may comprise an overhang. The antisense strand may comprise a lipid moiety. The antisense strand may comprise a GalNAc moiety.

[0113] In some embodiments, the siRNA comprises an antisense strand having a sequence in accordance with SEQ ID NO: 6299. In some embodiments, the antisense strand sequence comprises or consists of sequence at least 75% identical to SEQ ID NO: 6299, at least 80% identical to SEQ ID NO: 6299, at least 85% identical to SEQ ID NO: 6299, at least 90% identical to SEQ ID NO: 6299, or at least 95% identical to SEQ ID NO: 6299. In some embodiments, the antisense strand sequence comprises or consists of the sequence of SEQ ID NO 6299, or an antisense strand sequence thereof having 1, 2, 3, or 4 nucleoside substitutions, additions, or deletions. In some embodiments, the antisense strand sequence comprises or consists of the sequence of SEQ ID NO: 6299, or an antisense strand sequence thereof having 1 or 2 nucleoside substitutions, additions, or deletions. In some embodiments, the antisense strand sequence comprises or consists of a sequence 100% identical to SEQ ID NO: 6299. The antisense strand may comprise a modification pattern described herein. The antisense strand may comprise an overhang. The antisense strand may comprise a lipid moiety. The antisense strand may comprise a GalNAc moiety.

[0114] In some embodiments, the siRNA comprises an antisense strand having a sequence in accordance with SEQ ID NO: 6303. In some embodiments, the antisense strand sequence comprises or consists of sequence at least 75% identical to SEQ ID NO: 6303, at least 80% identical to SEQ ID NO: 6303, at least 85% identical to SEQ ID NO: 6303, at least 90% identical to SEQ ID NO: 6303, or at least 95% identical to SEQ ID NO: 6303. In some embodiments, the antisense strand sequence comprises or consists of the sequence of SEQ ID NO 6303, or an antisense strand sequence thereof having 1, 2, 3, or 4 nucleoside substitutions, additions, or deletions. In some embodiments, the antisense strand sequence comprises or consists of the sequence of SEQ ID NO: 6303, or an antisense strand sequence thereof having 1 or 2 nucleoside substitutions, additions, or deletions. In some embodiments, the antisense strand sequence comprises or consists of a sequence 100% identical to SEQ ID NO: 6303. The antisense strand may comprise a modification pattern described herein. The antisense strand may comprise an overhang. The antisense strand may comprise a lipid moiety. The antisense strand may comprise a GalNAc moiety.

[0115] In some embodiments, the siRNA comprises an antisense strand having a sequence in accordance with SEQ ID NO: 6309. In some embodiments, the antisense strand sequence comprises or consists of sequence at least 75% identical to SEQ ID NO: 6309, at least 80% identical to SEQ ID NO: 6309, at least 85% identical to SEQ ID NO: 6309, at least 90% identical to SEQ ID NO: 6309, or at least 95% identical to SEQ ID NO: 6309. In some embodiments, the antisense strand sequence comprises or consists of the sequence of SEQ ID NO 6309, or an antisense strand sequence thereof having 1, 2, 3, or 4 nucleoside substitutions, additions, or deletions. In some embodiments, the antisense strand sequence comprises or consists of the sequence of SEQ ID NO: 6309, or an antisense strand sequence thereof having 1 or 2 nucleoside substitutions, additions, or deletions. In some embodiments, the antisense strand sequence comprises or consists of a sequence 100% identical to SEQ ID NO: 6309. The antisense strand may comprise a modification pattern described herein. The antisense strand may comprise an overhang. The antisense strand may comprise a lipid moiety. The antisense strand may comprise a GalNAc moiety.

### 1. Hydrophobic Moieties

[0116] In some embodiments, the composition comprises an oligonucleotide that inhibits the expression of MST1, wherein the oligonucleotide comprises a hydrophobic moiety. The hydrophobic moiety may be attached at a 3′ or 5′ terminus of the oligonucleotide. The hydrophobic moiety may include a lipid such as a fatty acid. The hydrophobic moiety may include a hydrocarbon. The hydrocarbon may be linear. The hydrocarbon may be non-linear. The hydrophobic moiety may include a lipid moiety or a cholesterol moiety, or a combination thereof.

[0117] In some embodiments, the composition comprises an oligonucleotide that inhibits the expression of MST1, wherein the oligonucleotide comprises a lipid attached at a 3′ or 5′ terminus of the oligonucleotide. In some embodiments, the lipid comprises cholesterol, myristoyl, palmitoyl, stearoyl, lithocholoyl, docosanoyl, docosahexaenoyl, myristyl, palmityl, stearyl, or α-tocopherol, or a combination thereof.

[0118] In some embodiments, the composition comprises an oligonucleotide that inhibits the expression of MST1, wherein the oligonucleotide comprises a hydrophobic ligand or moiety. In some embodiments, the hydrophobic ligand or moiety comprises cholesterol. In some embodiments, the hydrophobic ligand or moiety comprises a cholesterol derivative. In some embodiments, the hydrophobic ligand or moiety is attached at a 3′ terminus of the oligonucleotide. In some embodiments, the hydrophobic ligand or moiety s attached at a 5′ terminus of the oligonucleotide. In some embodiments, the composition comprises a sense strand, and the hydrophobic ligand or moiety is attached to the sense strand (e.g. attached to a 5′ end of the sense strand, or attached to a 3′ end of the sense strand). In some embodiments, the composition comprises an antisense strand, and the hydrophobic ligand or moiety is attached to the antisense strand (e.g. attached to a 5′ end of the antisense strand, or attached to a 3′ end of the antisense strand). In some embodiments, the composition comprises a hydrophobic ligand or moiety attached at a 3′ or 5′ terminus of the oligonucleotide.

[0119] In some embodiments, a hydrophobic moiety is attached to the oligonucleotide (e.g. a sense strand and/or an antisense strand of a siRNA). In some embodiments, a hydrophobic moiety is attached at a 3′ terminus of the oligonucleotide. In some embodiments, a hydrophobic moiety is attached at a 5′ terminus of the oligonucleotide. In some embodiments, the hydrophobic moiety comprises cholesterol. In some embodiments, the hydrophobic moiety includes a cyclohexanyl.

[0120] In some embodiments, the composition comprises an oligonucleotide that inhibits the expression of MST1, wherein the oligonucleotide comprises a lipid attached at a 3′ or 5′ terminus of the oligonucleotide. In some embodiments, a lipid is attached at a 3′ terminus of the oligonucleotide. In some embodiments, a lipid is attached at a 5′ terminus of the oligonucleotide. In some embodiments, the lipid comprises cholesterol, myristoyl, palmitoyl, stearoyl, lithocholoyl, docosanoyl, docosahexaenoyl, myristyl, palmityl, stearyl, or α-tocopherol, or a combination thereof. In some embodiments, the lipid comprises stearyl, lithocholyl, docosanyl, docosahexaenyl, or myristyl. In some embodiments, the lipid comprises cholesterol. In some embodiments, the lipid includes a sterol such as cholesterol. In some embodiments, the lipid comprises stearyl, t-butylphenol, n-butylphenol, octylphenol, dodecylphenol, phenyl n-dodecyl, octadecylbenzamide, hexadecylbenzamide, or octadecylcyclohexyl. In some embodiments, the lipid comprises phenyl para C12.

[0121] In some embodiments, the oligonucleotide comprises any aspect of the following structure:

[chemical structure]

[0122] In some embodiments, the oligonucleotide comprises any aspect of the following structure:

[chemical structure]

In some embodiments, the oligonucleotide comprises any aspect of the following structure:

[chemical structure]

In some embodiments, the oligonucleotide comprises any aspect of the following structure: The aspect included in the oligonucleotide may include the entire structure, or may include the lipid moiety, of any of the structures shown. In some embodiments, n is 1-3. In some embodiments, n is 1. In some embodiments, n is 2. In some embodiments, n is 3. In some embodiments, R is an alkyl group. In some embodiments, the alkyl group contains 1, 2, 3, 4, 5, 6, 7, 8, 9, 10, 11, 12, 13, 14, 15, 16, 17, 18, 19, or 20 carbons. In some embodiments, the alkyl group contains 4, 5, 6, 7, 8, 9, 10, 11, 12, 13, 14, 15, 16, 17, or 18 carbons, or a range defined by any two of the aforementioned numbers of carbons. In some embodiments, the alkyl group contains 4-18 carbons. In some embodiments, the lipid moiety comprises an alcohol or ether.

[0123] In some embodiments, the lipid includes a fatty acid. In some embodiments, the lipid comprises a lipid depicted in Table 1. The example lipid moieties in Table 1 are shown attached at a 5′ end of an oligonucleotide, in which the 5′ terminal phosphate of the oligonucleotide is shown with the lipid moiety. In some embodiments, a lipid moiety in Table 1 may be attached at a different point of attachment than shown. For example, the point of attachment of any of the lipid moieties in the table may be at a 3′ oligonucleotide end. In some embodiments, the lipid is used for targeting the oligonucleotide to a non-hepatic cell or tissue.

TABLE 1
Hydrophobic moiety examples

| Hydrophobic | Hydrophobic | |
|---|---|---|
| Moiety Description | Moiety Name | Example Conjugation |
| stearyl | ETL3 | [chemical structure] |
| t-butylphenyl | ETL7 | [chemical structure] |
| n-butylphenyl | ETL8 | [chemical structure] |
| octylphenyl | ETL9 | [chemical structure] |
| dodecylphenyl | ETL10 | [chemical structure] |
| phenyl n-dodecyl | ETL12 | [chemical structure] |
| octadecylbenzamide | ETL13 | [chemical structure] |
| hexadecylbenzamide | ETL15 | [chemical structure] |
| octadecylcyclohexyl | ETL16 | [chemical structure] |

[0124] In some embodiments, the lipid or lipid moiety includes 16 to 18 carbons. In some embodiments, the lipid includes 16 carbons. In some embodiments, the lipid includes 17 carbons. In some embodiments, the lipid includes 18 carbons. In some embodiments, the lipid moiety includes 16 carbons. In some embodiments, the lipid moiety includes 17 carbons. In some embodiments, the lipid moiety includes 18 carbons.

[0125] The hydrophobic moiety may include a linker that comprises a carbocycle. The carbocycle may be six-membered. Some examples of a carbocycle include phenyl or cyclohexyl. The linker may include a phenyl. The linker may include a cyclohexyl. The lipid may be attached to the carbocycle, which may in turn be attached at a phosphate (e.g. 5′ or 3′ phosphate) of the oligonucleotide. In some embodiments, the lipid or hydrocarbon, and the end of the sense are connected to the phenyl or cyclohexyl linker in the 1,4; 1,3; or 1,2 substitution pattern (e.g. the para, meta, or ortho phenyl configuration). In some embodiments, the lipid or hydrocarbon, and the end of the sense are connected to the phenyl or cyclohexyl linker in the 1,4 substitution pattern (e.g. the para phenyl configuration). The lipid may be attached to the carbocycle in the 1,4 substitution pattern relative to the oligonucleotide. The lipid may be attached to the carbocycle in the 1,3 substitution pattern relative to the oligonucleotide. The lipid may be attached to the carbocycle in the 1,2 substitution pattern relative to the oligonucleotide. The lipid may be attached to the carbocycle in the ortho orientation relative to the oligonucleotide. The lipid may be attached to the carbocycle in the para orientation relative to the oligonucleotide. The lipid may be attached to the carbocycle in the meta orientation relative to the oligonucleotide.

[0126] The lipid moiety may comprise or consist of the following structure

[chemical structure]

[0127] In some embodiments, the lipid moiety comprises or consists of the following structure:

[chemical structure]

In some embodiments, the lipid moiety comprises the following structure:

[chemical structure]

In some embodiments, the lipid moiety comprises or consist of the following structure:

[chemical structure]

In some embodiments, the dotted line indicates a covalent connection. The covalent connection may between an end of the sense or antisense strand. For example, the connection may be to the 5′ end of the sense strand. In some embodiments, n is 0-3. In some embodiments, n is 1-3. In some embodiments, n is 0. In some embodiments, n is 1. In some embodiments, n is 2. In some embodiments, n is 3. In some embodiments, n is 4. In some embodiments, n is 5. In some embodiments, n is 1, 2, 3, 4, 5, 6, 7, 8, 9, or 10. In some embodiments, R is an alkyl group. In some embodiments, the alkyl group contains 1, 2, 3, 4, 5, 6, 7, 8, 9, 10, 11, 12, 13, 14, 15, 16, 17, 18, 19, or 20 carbons. In some embodiments, the alkyl group contains 4, 5, 6, 7, 8, 9, 10, 11, 12, 13, 14, 15, 16, 17, or 18 carbons, or a range defined by any two of the aforementioned numbers of carbons. In some embodiments, R comprises or consists of an alkyl group containing 4-18 carbons.

[0128] The lipid moiety may be attached at a 5′ end of the oligonucleotide. The 5′ end may have one phosphate linking the lipid moiety to a 5′ carbon of a sugar of the oligonucleotide. The 5′ end may have two phosphates linking the lipid moiety to a 5′ carbon of a sugar of the oligonucleotide. The 5′ end may have three phosphates linking the lipid moiety to a 5′ carbon of a sugar of the oligonucleotide. The 5′ end may have one phosphate connected to the 5′ carbon of a sugar of the oligonucleotide, where the one phosphate is connected to the lipid moiety. The 5′ end may have two phosphates connected to the 5′ carbon of a sugar of the oligonucleotide, where the one of the two phosphates is connected to the lipid moiety. The 5′ end may have three phosphates connected to the 5′ carbon of a sugar of the oligonucleotide, where the one of the three phosphates is connected to the lipid moiety. The sugar may include a ribose. The sugar may include a deoxyribose. The sugar may be modified a such as a 2′ modified sugar (e.g. a 2′ O-methyl or 2′ fluoro ribose). A phosphate of the 5′ end may include a modification such as a sulfur in place of an oxygen. Two phosphates of the 5′ end may include a modification such as a sulfur in place of an oxygen. Three phosphates of the 5′ end may include a modification such as a sulfur in place of an oxygen.

[0129] In some embodiments, the oligonucleotide includes 1 lipid moiety. In some embodiments, the oligonucleotide includes 2 lipid moieties. In some embodiments, the oligonucleotide includes 3 lipid moieties. In some embodiments, the oligonucleotide includes 4 lipid moieties.

[0130] Some embodiments relate to a method of making an oligonucleotide comprising a hydrophobic conjugate. A strategy for making hydrophobic conjugates may include use of a phosphoramidite reagent based upon a 6-membered ring alcohol such as a phenol or cyclohexanol. The phosphoramidite may be reacted to a nucleotide to connect the nucleotide to the hydrophobic moiety, and thereby produce the hydrophobic conjugate. Some examples of phosphoramidite reagents that may be used to produce a hydrophobic conjugate are provided as follows:

[chemical structure]

In some embodiments, n is 1-3. In some embodiments, n is 1. In some embodiments, n is 2. In some embodiments, n is 3. In some embodiments, R is an alkyl group. In some embodiments, the alkyl group contains 1, 2, 3, 4, 5, 6, 7, 8, 9, 10, 11, 12, 13, 14, 15, 16, 17, 18, 19, or 20 carbons. In some embodiments, the alkyl group contains 4, 5, 6, 7, 8, 9, 10, 11, 12, 13, 14, 15, 16, 17, or 18 carbons, or a range defined by any two of the aforementioned numbers of carbons. In some embodiments, R comprises or consists of an alkyl group containing 4-18 carbons. Any one of the phosphoramidite reagents may be reacted to a 5′ end of an oligonucleotide to produce an oligonucleotide comprising a hydrophobic moiety. In some embodiments, the phosphoramidite reagents is reacted to a 5′ end of a sense strand of an siRNA. The sense strand may then be hybridized to an antisense strand to form a duplex. The hybridization may be performed by incubating the sense and antisense strands in solution at a given temperature. The temperature may be gradually reduced. The temperature may comprise or include a temperature comprising an annealing temperature for the sense and antisense strands. The temperature may be below or include a temperature below the annealing temperature for the sense and antisense strands. The temperature may be below a melting temperature of the sense and antisense strands.

[0131] The lipid may be attached to the oligonucleotide by a linker. The linker may include a polyethyleneglycol (e.g. tetraethyleneglycol).

[0132] The modifications described herein may be useful for delivery to a cell or tissue, for example, extrahepatic delivery or targeting of an oligonucleotide composition. The modifications described herein may be useful for targeting an oligonucleotide composition to a cell or tissue.

### 2. Sugar Moieties

[0133] In some embodiments, the composition comprises an oligonucleotide that inhibits the expression of MST1, wherein the oligonucleotide comprises a sugar moiety. The sugar moiety may include an N-acetyl galactose moiety (e.g. an N-acetylgalactosamine (GalNAc) moiety), an N-acetyl glucose moiety (e.g. an N-acetylglucosamine (GlcNAc) moiety), a fucose moiety, or a mannose moiety. The sugar moiety may include 1, 2, 3, or more sugar molecules. The sugar moiety may be attached at a 3′ or 5′ terminus of the oligonucleotide. The sugar moiety may include an N-acetyl galactose moiety. The sugar moiety may include an N-acetylgalactosamine (GalNAc) moiety. The sugar moiety may include an N-acetyl glucose moiety. The sugar moiety may include N-acetylglucosamine (GlcNAc) moiety. The sugar moiety may include a fucose moiety. The sugar moiety may include a mannose moiety. N-acetyl glucose, GlcNAc, fucose, or mannose may be useful for targeting macrophages when they target or bind a mannose receptor such as CD206. The sugar moiety may be useful for binding or targeting an asialoglycoprotein receptor such as an asialoglycoprotein receptor of a hepatocyte. The GalNAc moiety may bind to an asialoglycoprotein receptor. The GalNAc moiety may target a hepatocyte.

[0134] In some embodiments, the composition comprises an oligonucleotide that inhibits the expression of MST1, wherein the oligonucleotide comprises an N-acetylgalactosamine (GalNAc) moiety. GalNAc may be useful for hepatocyte targeting. The GalNAc moiety may include a bivalent or trivalent branched linker. The oligo may be attached to 1, 2 or 3 GalNAcs through a bivalent or trivalent branched linker. The GalNAc moiety may include 1, 2, 3, or more GalNAc molecules. The GalNAc moiety may be attached at a 3′ or 5′ terminus of the oligonucleotide.

[0135] In some embodiments, the composition comprises an oligonucleotide that inhibits the expression of MST1, wherein the oligonucleotide comprises an N-acetylgalactosamine (GalNAc) ligand for hepatocyte targeting. In some embodiments, the composition comprises GalNAc. In some embodiments, the composition comprises a GalNAc derivative. In some embodiments, the GalNAc ligand is attached at a 3′ terminus of the oligonucleotide. In some embodiments, the GalNAc ligand is attached at a 5′ terminus of the oligonucleotide. In some embodiments, the composition comprises a sense strand, and the GalNAc ligand is attached to the sense strand (e.g. attached to a 5′ end of the sense strand, or attached to a 3′ end of the sense strand). In some embodiments, the composition comprises an antisense strand, and the GalNAc ligand is attached to the antisense strand (e.g. attached to a 5′ end of the antisense strand, or attached to a 3′ end of the antisense strand). In some embodiments, the composition comprises a GalNAc ligand attached at a 3′ or 5′ terminus of the oligonucleotide.

[0136] Disclosed herein, in some embodiments, are compositions comprising an oligonucleotide that inhibits the expression of MST1, wherein the oligonucleotide comprises a GalNAc moiety. The GalNAc moiety may be included in any formula, structure, or GalNAc moiety shown below. In some embodiments, described herein is a compound (e.g. oligonucleotide) represented by Formula (I) or (II):

[chemical structure]

[0137] or a salt thereof, wherein
[0138] J is an oligonucleotide;
[0139] each w is independently selected from any value from 1 to 20;
[0140] each v is independently selected from any value from 1 to 20;
[0141] n is selected from any value from 1 to 20;
[0142] m is selected from any value from 1 to 20;
[0143] z is selected from any value from 1 to 3, wherein
   [0144] if z is 3, Y is C
   [0145] if z is 2, Y is CR⁶, or
   [0146] if z is 1, Y is C(R⁶)₂;
[0147] Q is selected from:
   [0148] C₃₋₁₀ carbocycle optionally substituted with one or more substituents independently selected from halogen, —CN, —NO₂, —OR⁷, —SR⁷, —N(R⁷)₂, —C(O)R⁷, —C(O)N(R⁷)₂, —N(R⁷)C(O)R⁷, —N(R⁷)C(O)N(R⁷)₂, —OC(O)N(R⁷)₂, —N(R⁷)C(O)OR⁷, —C(O)OR⁷, —OC(O)R⁷, —S(O)R⁷, and C₁₋₆ alkyl, wherein the C₁₋₆ alkyl, is optionally substituted with one or more substituents independently selected from halogen, —CN, —OH, —SH, —NO₂, and —NH₂;
[0149] R¹ is a linker selected from:
   [0150] —O—, —S—, —N(R⁷)—, —C(O)—, —C(O)N(R⁷)—, —N(R⁷)C(O)—, —N(R⁷)C(O)N(R⁷)—, —OC(O)N(R⁷)—, —N(R⁷)C(O)O—, —C(O)O—, —OC(O)—, —S(O)—, —S(O)₂—, —OS(O)₂—, —OP(O)(OR⁷)O—, —SP(O)(OR⁷)O—, —OP(S)(OR⁷)O—, —OP(O)(SR⁷)O—, —OP(O)(OR⁷)S—, —OP(O)(O⁻)O—, —SP(O)(O⁻)O—, —OP(S)(O⁻)O—, —OP(O)(S⁻)O—, —OP(O)(O⁻)S—, —OP(O)(OR⁷)NR⁷—, —OP(O)(N(R⁷)₂)NR⁷—, —OP(OR⁷)O—, —OP(N(R⁷)₂)O—, —OP(OR⁷)N(R⁷)—, and —OPN(R⁷)₂NR⁷—;
[0151] each R² is independently selected from:
   [0152] C₁₋₆ alkyl optionally substituted with one or more substituents independently selected from halogen, —OR⁷, —SR⁷, —N(R⁷)₂, —C(O)R⁷, —C(O)N(R⁷)₂, —N(R⁷)C(O)R⁷, —N(R⁷)C(O)N(R⁷)₂, —OC(O)N(R⁷)₂, —N(R⁷)C(O)OR⁷, —C(O)OR⁷, —OC(O)R⁷, and —S(O)R⁷;
[0153] R³ and R⁴ are each independently selected from:
   [0154] —OR⁷, —SR⁷, —N(R⁷)₂, —C(O)R⁷, —C(O)N(R⁷)₂, —N(R⁷)C(O)R⁷, —N(R⁷)C(O)N(R⁷)₂, —OC(O)N(R⁷)₂, —N(R⁷)C(O)OR⁷, —C(O)OR⁷, —OC(O)R⁷, and —S(O)R⁷;
[0155] each R⁵ is independently selected from:
   [0156] —OC(O)R⁷, —OC(O)N(R⁷)₂, —N(R⁷)C(O)R⁷, —N(R⁷)C(O)N(R⁷)₂, —N(R⁷)C(O)OR⁷, —C(O)R⁷, —C(O)OR⁷, and —C(O)N(R⁷)₂;
[0157] each R⁶ is independently selected from:
   [0158] hydrogen;
   [0159] halogen, —CN, —NO₂, —OR⁷, —SR⁷, —N(R⁷)₂, —C(O)R⁷, —C(O)N(R⁷)₂, —N(R⁷)C(O)R⁷, —N(R⁷)C(O)N(R⁷)₂, —OC(O)N(R⁷)₂, —N(R⁷)C(O)OR⁷, —C(O)OR⁷, —OC(O)R⁷, and —S(O)R⁷; and
   [0160] C₁₋₆ alkyl optionally substituted with one or more substituents independently selected from halogen, —CN, —NO₂, —OR⁷, —SR⁷, —N(R⁷)₂, —C(O)R⁷, —C(O)N(R⁷)₂, —N(R⁷)C(O)R⁷, —N(R⁷)C(O)N(R⁷)₂, —OC(O)N(R⁷)₂, —N(R⁷)C(O)OR⁷, —C(O)OR⁷, —OC(O)R⁷, and —S(O)R⁷;
[0161] each R⁷ is independently selected from:
   [0162] hydrogen;
   [0163] C₁₋₆ alkyl, C₂₋₆ alkenyl, and C₂₋₆ alkynyl, each of which is optionally substituted with one or more substituents independently selected from halogen, —CN, —OH, —SH, —NO₂, —NH₂, ═O, ═S, —O—C₁₋₆ alkyl, —S—C₁₋₆ alkyl, —N(C₁₋₆ alkyl)₂, —NH(C₁₋₆ alkyl), C₃₋₁₀ carbocycle, and 3- to 10-membered heterocycle; and
   [0164] C₃₋₁₀ carbocycle, and 3- to 10-membered heterocycle, each of which is optionally substituted with one or more substituents independently selected from halogen, —CN, —OH, —SH, —NO₂, —NH₂, ═O, ═S, —O—C₁₋₆ alkyl, —S—C₁₋₆ alkyl, —N(C₁₋₆ alkyl)₂, —NH(C₁₋₆ alkyl), C₁₋₆ alkyl, C₂₋₆ alkenyl, C₂₋₆ alkynyl, C₃₋₁₀ carbocycle, 3- to 10-membered heterocycle, and C₁₋₆ haloalkyl.
      In some embodiments, each w is independently selected from any value from 1 to 10. In some embodiments, each w is independently selected from any value from 1 to 5. In some embodiments, each w is 1. In some embodiments, each v is independently selected from any value from 1 to 10. In some embodiments, each v is independently selected from any value from 1 to 5. In some embodiments, each v is 1. In some embodiments, n is selected from any value from 1 to 10. In some embodiments, n is selected from any value from 1 to 5. In some embodiments, n is 2. In some embodiments, m is selected from any value from 1 to 10. In some embodiments, m is selected from any value from 1 to 5. In some embodiments, m is selected from 1 and 2. In some embodiments, z is 3 and Y is C. In some embodiments, Q is selected from C₅₋₆ carbocycle optionally substituted with one or more substituents independently selected from halogen, —CN, —NO₂, —OR⁷, —SR⁷, —N(R⁷)₂, —C(O)R⁷, —C(O)N(R⁷)₂, —N(R⁷)C(O)R⁷, —N(R⁷)C(O)N(R⁷)₂, —OC(O)N(R⁷)₂, —N(R⁷)C(O)OR⁷, —C(O)OR⁷, —OC(O)R⁷, and —S(O)R⁷. In some embodiments, Q is selected from C₅₋₆ carbocycle optionally substituted with one or more substituents independently selected from halogen, —CN, —OH, —SH, —NO₂, and —NH₂. In some embodiments, Q is selected from phenyl and cyclohexyl, each of which is optionally substituted with one or more substituents independently selected from halogen, —CN, —OH, —SH, —NO₂, and —NH₂. In some embodiments, Q is selected from phenyl. In some embodiments, Q is selected from cyclohexyl. In some embodiments, R¹ is selected from —OP(O)(OR⁷)O—, —SP(O)(OR⁷)O—, —OP(S)(OR⁷)O—, —OP(O)(SR⁷)O—, —OP(O)(OR⁷)S—, —OP(O)(O⁻)O—, —SP(O)(O⁻)O—, —OP(S)(O⁻)O—, —OP(O)(S⁻)O—, —OP(O)(O⁻)S—, —OP(O)(OR⁷)NR⁷—, —OP(O)(N(R⁷)₂)NR⁷—, —OP(OR⁷)O—, —OP(N(R⁷)₂)O—, —OP(OR⁷)N(R⁷)—, and —OPN(R⁷)₂—NR⁷. In some embodiments, R¹ is selected from —OP(O)(OR⁷)O—, —SP(O)(OR⁷)O—, —OP(S)(OR⁷)O—, —OP(O)(SR⁷)O—, —OP(O)(OR⁷)S—, —OP(O)(O⁻)O—, —SP(O)(O⁻)O—, —OP(S)(O⁻)O—, —OP(O)(S⁻)O—, —OP(O)(O⁻)S—, and —OP(OR⁷)O—. In some embodiments, R¹ is selected from —OP(O)(OR⁷)O—, —OP(S)(OR⁷)O—, —OP(O)(O⁻)O—, —OP(S)(O⁻)O—, —OP(O)(S⁻)O—, and —OP(OR⁷)O—. In some embodiments, R¹ is selected from —OP(O)(OR⁷)O— and —OP(OR⁷)O—. In some embodiments, R² is selected from C1-3 alkyl substituted with one or more substituents independently selected from halogen, —OR⁷, —OC(O)R⁷, —SR⁷, —N(R⁷)₂, —C(O)R⁷, and —S(O)R⁷. In some embodiments, R² is selected from C₁₋₃ alkyl substituted with one or more substituents independently selected from —OR⁷, —OC(O)R⁷, —SR⁷, and —N(R⁷)₂. In some embodiments, R² is selected from C₁₋₃ alkyl substituted with one or more substituents independently selected from —OR⁷ and —OC(O)R⁷. In some embodiments, R³ is selected from halogen, —OR⁷, —SR⁷, —N(R⁷)₂, —C(O)R⁷, —OC(O)R⁷, and —S(O)R⁷. In some embodiments, R³ is selected from —OR⁷, —SR⁷, —OC(O)R⁷, and —N(R⁷)₂. In some embodiments, R³ is selected from —OR⁷— and —OC(O)R⁷. In some embodiments, R⁴ is selected from halogen, —OR⁷, —SR⁷, —N(R⁷)₂, —C(O)R⁷, —OC(O)R⁷, and —S(O)R⁷. In some embodiments, R⁴ is selected from —OR⁷—SR⁷, —OC(O)R⁷, and —N(R⁷)₂. In some embodiments, R⁴ is selected from —OR⁷— and —OC(O)R⁷. In some embodiments, R⁵ is selected from —OC(O)R⁷, —OC(O)N(R⁷)₂, —N(R⁷)C(O)R⁷, —N(R⁷)C(O)N(R⁷)₂, and —N(R⁷)C(O)OR⁷. In some embodiments, R₅ is selected from —OC(O)R⁷ and —N(R⁷)C(O)R⁷. In some embodiments, each R⁷ is independently selected from: hydrogen; and C₁₋₆alkyl optionally substituted with one or more substituents independently selected from halogen, —CN, —OH, —SH, —NO₂, —NH₂, ═O, ═S, —O—C₁₋₆ alkyl, —S—C₁₋₆ alkyl, —N(C₁₋₆ alkyl)₂, —NH(C₁₋₆ alkyl), C₃₋₁₀ carbocycle, or 3- to 10-membered heterocycle. In some embodiments, each R⁷ is independently selected from C₁₋₆alkyl optionally substituted with one or more substituents independently selected from halogen, —CN, —OH, —SH, —NO₂, —NH₂, ═O, ═S, —O—C₁₋₆ alkyl, —S—C₁₋₆ alkyl, —N(C₁₋₆ alkyl)₂, and —NH(C₁₋₆ alkyl). In some embodiments, each R⁷ is independently selected from C₁₋₆ alkyl optionally substituted with one or more substituents independently selected from halogen, —CN, —OH, and —SH. In some embodiments, w is 1; v is 1; n is 2; m is 1 or 2; z is 3 and Y is C; Q is phenyl or cyclohexyl, each of which is optionally substituted with one or more substituents independently selected from halogen, —CN, —OH, —SH, —NO₂, —NH₂, and C₁₋₃ alkyl; R¹ is selected from —OP(O)(OR⁷)O—, —OP(S)(OR⁷)O—, —OP(O)(O⁻)O—, —OP(S)(O⁻)O—, —OP(O)(S⁻)O—, and —OP(OR⁷)O—; R² is C₁ alkyl substituted with —OH or —OC(O)CH₃;
[0165] R³ is —OH or —OC(O)CH₃; R⁴ is —OH or —OC(O)CH₃; and W is —NH(O)CH₃. In some embodiments, the compound comprises:

[chemical structure]

[chemical structure]

[chemical structure]

[chemical structure]

[chemical structure]

[chemical structure]

[chemical structure]

[chemical structure]

[chemical structure]

[chemical structure]

[chemical structure]

[chemical structure]

[chemical structure]

[chemical structure]

[chemical structure]

[chemical structure]

In some embodiments, the oligonucleotide (J) is attached at a 5′ end or a 3′ end of the oligonucleotide. In some embodiments, the oligonucleotide comprises DNA. In some embodiments, the oligonucleotide comprises RNA. In some embodiments, the oligonucleotide comprises one or more modified internucleoside linkages. In some embodiments, the one or more modified internucleoside linkages comprise alkylphosphonate, phosphorothioate, methylphosphonate, phosphorodithioate, alkylphosphonothioate, phosphoramidate, carbamate, carbonate, phosphate triester, acetamidate, or carboxymethyl ester, or a combination thereof. In some embodiments, the oligonucleotide comprises 1, 2, 3, 4, 5, 6, 7, 8, 9, 10, 11, 12, 13, 14, 15, 16, 17, 18, 19, or 20 modified internucleoside linkages. In some embodiments, the compound binds to an asialoglycoprotein receptor. In some embodiments, the compound targets a hepatocyte.

[0166] Some embodiments include the following, where J is the oligonucleotide:

[chemical structure]

J may include one or more additional phosphates or one or more phosphorothioates linking to the oligonucleotide. J may include one or more additional phosphates linking to the oligonucleotide. J may include one or more phosphorothioates linking to the oligonucleotide.

[0167] Some embodiments include the following, where J is the oligonucleotide:

[chemical structure]

J may include one or more additional phosphates, or one or more phosphorothioates linking to the oligonucleotide. J may include one or more additional phosphates linking to the oligonucleotide. J may include one or more phosphorothioates linking to the oligonucleotide.

[0168] Some embodiments include the following, where J is the oligonucleotide.

[chemical structure]

J may include one or more phosphates or phosphorothioates linking to the oligonucleotide. J may include one or more phosphates linking to the oligonucleotide. J may include a phosphate linking to the oligonucleotide. J may include one or more phosphorothioates linking to the oligonucleotide. J may include a phosphorothioate linking to the oligonucleotide.

[0169] Some embodiments include the following, where J is the oligonucleotide.

[chemical structure]

The structure in this compound attached to the oligonucleotide (J) may be referred to as “ETL17,” and is an example of a GalNAc moiety. J may include one or more phosphates or phosphorothioates linking to the oligonucleotide. J may include one or more phosphates linking to the oligonucleotide. J may include a phosphate linking to the oligonucleotide. J may include one or more phosphorothioates linking to the oligonucleotide. J may include a phosphorothioate linking to the oligonucleotide.

[0170] Some embodiments include the following, where the phosphate or “5′” indicates a connection to the oligonucleotide:

[chemical structure]

[0171] Some embodiments include the following, where the phosphate or “5′” indicates a connection to the oligonucleotide:

[chemical structure]

[0172] Some embodiments include the following, where J is the oligonucleotide:

[chemical structure]

include one or more phosphates or phosphorothioates linking to the oligonucleotide. J may include one or more phosphates linking to the oligonucleotide. J may include a phosphate linking to the oligonucleotide. J may include one or more phosphorothioates linking to the oligonucleotide. J may include a phosphorothioate linking to the oligonucleotide.

[0173] Some embodiments include the following, where J is the oligonucleotide:

[chemical structure]

The structure in this compound attached to the oligonucleotide (J) may be referred to as “ETL1,” and is an example of a GalNAc moiety. J may include one or more phosphates or phosphorothioates linking to the oligonucleotide. J may include one or more phosphates linking to the oligonucleotide. J may include a phosphate linking to the oligonucleotide. J may include one or more phosphorothioates linking to the oligonucleotide. J may include a phosphorothioate linking to the oligonucleotide.
3. siRNA Modification Patterns

[0174] In some embodiments, the composition comprises an oligonucleotide that inhibits the expression of MST1, wherein the oligonucleotide comprises an siRNA comprising a sense strand and an antisense strand, wherein the sense strand comprises modification pattern 1S: 5′-NfsnsNfnNfnNfNfNfnNfnNfnNfnNfnNfsnsn-3′ (SEQ ID NO: 6164), wherein “Nf” is a 2′ fluoro-modified nucleoside, “n” is a 2′ O-methyl modified nucleoside, and “s” is a phosphorothioate linkage. In some embodiments, the sense strand comprises modification pattern 2S: 5′-nsnsnnNfnNfNfNfnnnnnnnnnnsnsn-3′ (SEQ ID NO: 6165), wherein “Nf” is a 2′ fluoro-modified nucleoside, “n” is a 2′ O-methyl modified nucleoside, and “s” is a phosphorothioate linkage. In some embodiments, the sense strand comprises modification pattern 3S: 5′-nsnsnnNfnNfnNfnnnnnnnnnnsnsn-3′ (SEQ ID NO: 6166), wherein “Nf” is a 2′ fluoro-modified nucleoside, “n” is a 2′ O-methyl modified nucleoside, and “s” is a phosphorothioate linkage. In some embodiments, the sense strand comprises modification pattern 4S: 5′-NfsnsNfnNfnNfNfNfnNfnNfnNfnNfnNfsnsnN-moiety-3′ (SEQ ID NO: 6167), wherein “Nf” is a 2′ fluoro-modified nucleoside, “n” is a 2′ O-methyl modified nucleoside, “s” is a phosphorothioate linkage, and N comprises one or more nucleosides. In some embodiments, the sense strand comprises modification pattern 5S: 5′-nsnsnnNfnNfNfNfnnnnnnnnnnsnsnN-moiety-3′ (SEQ ID NO: 6168), wherein “Nf” is a 2′ fluoro-modified nucleoside, “n” is a 2′ O-methyl modified nucleoside, “s” is a phosphorothioate linkage, and N comprises one or more nucleosides. In some embodiments, the moiety in modification pattern 4S or 5S includes an integrin targeting ligand. In some embodiments, the moiety in modification pattern 4S or 5S is a sugar moiety. In some embodiments, the sense strand comprises modification pattern 6S: 5′-NfsnsNfnNfnNfnNfnNfnNfnNfnNfnNfsnsn-3′ (SEQ ID NO: 6169), wherein “Nf” is a 2′ fluoro-modified nucleoside, “n” is a 2′ O-methyl modified nucleoside, and “s” is a phosphorothioate linkage. In some embodiments, the sense strand comprises modification pattern 7S: 5′-nsnsnnNfNfNfNfNfnnnnnnnnnnsnsn-3′ (SEQ ID NO: 6170), wherein “Nf” is a 2′ fluoro-modified nucleoside, “n” is a 2′ O-methyl modified nucleoside, and “s” is a phosphorothioate linkage. In some embodiments, the sense strand comprises modification pattern 8S: 5′-nsnsnnnNfNfNfNfnnnnnnnnnnsnsn-3′ (SEQ ID NO: 6171), wherein “Nf” is a 2′ fluoro-modified nucleoside, “n” is a 2′ O-methyl modified nucleoside, and “s” is a phosphorothioate linkage. In some embodiments, the sense strand comprises modification pattern 9S: 5′-nsnsnnnnNfNfNfNfnnnnnnnnnsnsn-3′ (SEQ ID NO: 6172), wherein “Nf” is a 2′ fluoro-modified nucleoside, “n” is a 2′ O-methyl modified nucleoside, and “s” is a phosphorothioate linkage. In some embodiments, the sense strand comprises modification pattern 10S: 5′-snnnnNfnnnNfNfnnnnnnnnnsnsn-3′ (SEQ ID NO: 6320), wherein “Nf” is a 2′ fluoro-modified nucleoside, “n” is a 2′ O-methyl modified nucleoside, and “s” is a phosphorothioate linkage. In some embodiments, the sense strand comprises modification pattern 11S: 5′-sNfnNfnNfnNfndNnNfnnnNfnNfnnsnsn-3′ (SEQ ID NO: 6321), wherein “Nf” is a 2′ fluoro-modified nucleoside, “n” is a 2′ O-methyl modified nucleoside, and “s” is a phosphorothioate linkage. In some embodiments, the sense strand comprises modification pattern 12S: 5′-sNfnNfnNfnNfndNnnnNfnNfnnnnsnsn-3′ (SEQ ID NO: 6322), wherein “Nf” is a 2′ fluoro-modified nucleoside, “n” is a 2′ O-methyl modified nucleoside, and “s” is a phosphorothioate linkage. In some embodiments, the sense strand comprises modification pattern 13S: 5′-snnnnNfNfnNfNfnNfnnnnnnnnsnsn-3′ (SEQ ID NO: 6323), wherein “Nf” is a 2′ fluoro-modified nucleoside, “n” is a 2′ O-methyl modified nucleoside, and “s” is a phosphorothioate linkage. In some embodiments, the sense strand comprises modification pattern 14S: 5′-snnnnnNfNfNfNfnnnnnnnnnnsnsn-3′ (SEQ ID NO: 6324), wherein “Nf” is a 2′ fluoro-modified nucleoside, “n” is a 2′ O-methyl modified nucleoside, and “s” is a phosphorothioate linkage. In some embodiments, the sense strand comprises modification pattern 15S: 5′-snnnnNfnNfnNfnnnnnnnnnnsnsn-3′ (SEQ ID NO: 6325), wherein “Nf” is a 2′ fluoro-modified nucleoside, “n” is a 2′ O-methyl modified nucleoside, and “s” is a phosphorothioate linkage. In some embodiments, the sense strand comprises modification pattern 16S: 5′-nsnsnnNfNfnNfNfnnnnnnnnnnsnsn-3′ (SEQ ID NO: 6326), wherein “Nf” is a 2′ fluoro-modified nucleoside, “n” is a 2′ O-methyl modified nucleoside, and “s” is a phosphorothioate linkage. In some embodiments, the sense strand comprises modification pattern 17S: 5′-NfsnsNfnNfnNfndNnNfnnnNfnNfnnsnsn-3′ (SEQ ID NO: 6327), wherein “Nf” is a 2′ fluoro-modified nucleoside, “n” is a 2′ O-methyl modified nucleoside, and “s” is a phosphorothioate linkage. In some embodiments, the sense strand comprises modification pattern 18S: 5′-nsnsnnnnNfNfNfNfNfnnnnnnnnsnsn-3′ (SEQ ID NO: 6328), wherein “Nf” is a 2′ fluoro-modified nucleoside, “n” is a 2′ O-methyl modified nucleoside, and “s” is a phosphorothioate linkage. In some embodiments, the sense strand comprises modification pattern 19S: 5′-nsnsnnnNfNfNfNfNfnnnnnnnnnsnsn-3′ (SEQ ID NO: 6329), wherein “Nf” is a 2′ fluoro-modified nucleoside, “n” is a 2′ O-methyl modified nucleoside, and “s” is a phosphorothioate linkage. In some embodiments, the sense strand comprises modification pattern 20S: 5′-snnnnnNfnNfNfnnnnnnnnnnsnsn-3′ (SEQ ID NO: 6330), wherein “Nf” is a 2′ fluoro-modified nucleoside, “n” is a 2′ O-methyl modified nucleoside, and “s” is a phosphorothioate linkage. In some embodiments, the sense strand comprises modification pattern 21S: 5′-snnnnnnNfNfNfNfNfnnnnnnnnsnsn-3′ (SEQ ID NO: 6331), wherein “Nf” is a 2′ fluoro-modified nucleoside, “n” is a 2′ O-methyl modified nucleoside, and “s” is a phosphorothioate linkage. In some embodiments, the sense strand comprises modification pattern 22S: 5′-snnnnNfNfnnNfnnnnnnnnnnsnsn-3′ (SEQ ID NO: 6332), wherein “Nf” is a 2′ fluoro-modified nucleoside, “n” is a 2′ O-methyl modified nucleoside, and “s” is a phosphorothioate linkage. In some embodiments, the sense strand comprises modification pattern 23S: 5′-snnnnNfNfnNfNfnnnnnnnnnnsnsn-3′ (SEQ ID NO: 6333), wherein “Nf” is a 2′ fluoro-modified nucleoside, “n” is a 2′ O-methyl modified nucleoside, and “s” is a phosphorothioate linkage. In some embodiments, the sense strand comprises modification pattern 24S: 5′-snnnnnNfNfnNfNfnnnnnnnnnsnsn-3′ (SEQ ID NO: 6334), wherein “Nf” is a 2′ fluoro-modified nucleoside, “n” is a 2′ O-methyl modified nucleoside, and “s” is a phosphorothioate linkage. In some embodiments, the sense strand comprises modification pattern 25S: 5′-snnnnnnNfnNfnNfnnnnnnnnsnsn-3′ (SEQ ID NO: 6335), wherein “Nf” is a 2′ fluoro-modified nucleoside, “n” is a 2′ O-methyl modified nucleoside, and “s” is a phosphorothioate linkage. In some embodiments, the sense strand comprises modification pattern 26S: 5′-snnnnnNfnnNfnNfnnnnnnnnsnsn-3′ (SEQ ID NO: 6336), wherein “Nf” is a 2′ fluoro-modified nucleoside, “n” is a 2′ O-methyl modified nucleoside, and “s” is a phosphorothioate linkage. In some embodiments, the sense strand comprises modification pattern 27S: 5′-snnnnNfnnNfNfNfNfnnnnnnnnsnsn-3′ (SEQ ID NO: 6337), wherein “Nf” is a 2′ fluoro-modified nucleoside, “n” is a 2′ O-methyl modified nucleoside, and “s” is a phosphorothioate linkage. In some embodiments, the sense strand comprises modification pattern 28S: 5′-snnnnnNfNfNfNfNfnnnnnnnnnsnsn-3′ (SEQ ID NO: 6338), wherein “Nf” is a 2′ fluoro-modified nucleoside, “n” is a 2′ O-methyl modified nucleoside, and “s” is a phosphorothioate linkage. In some embodiments, the sense strand comprises modification pattern 29S: 5′-snnnnnNfnnNfNfnnnnnnnnnsnsn-3′ (SEQ ID NO: 6339), wherein “Nf” is a 2′ fluoro-modified nucleoside, “n” is a 2′ O-methyl modified nucleoside, and “s” is a phosphorothioate linkage. In some embodiments, the sense strand comprises modification pattern 30S: 5′-snnnnnnNfnNfNfnnnnnnnnnsnsn-3′ (SEQ ID NO: 6340), wherein “Nf” is a 2′ fluoro-modified nucleoside, “n” is a 2′ O-methyl modified nucleoside, and “s” is a phosphorothioate linkage. In some embodiments, the sense strand comprises modification pattern 31s: 5′-snnnnNfNfnnNfNfnnnnnnnnnsnsn-3′ (SEQ ID NO: 6341), wherein “Nf” is a 2′ fluoro-modified nucleoside, “n” is a 2′ O-methyl modified nucleoside, and “s” is a phosphorothioate linkage. In some embodiments, the sense strand comprises modification pattern 32S: 5′-snnnnNfnnNfNfnnnnnnnnnnsnsn-3′ (SEQ ID NO: 6342), wherein “Nf” is a 2′ fluoro-modified nucleoside, “n” is a 2′ O-methyl modified nucleoside, and “s” is a phosphorothioate linkage. In some embodiments, the sense strand comprises modification pattern 33S: 5′-snnnnNfndNnNfnNfnnnnnnnnsnsn-3′ (SEQ ID NO: 6343), wherein “Nf” is a 2′ fluoro-modified nucleoside, “n” is a 2′ O-methyl modified nucleoside, and “s” is a phosphorothioate linkage. In some embodiments, the sense strand comprises modification pattern 34S: 5′-snnnnnnnnNfdNNfnnnnnnnnsnsn-3′ (SEQ ID NO: 6344), wherein “Nf” is a 2′ fluoro-modified nucleoside, “n” is a 2′ O-methyl modified nucleoside, and “s” is a phosphorothioate linkage. In some embodiments, the sense strand comprises modification pattern 35S: 5′-snnnnNfnnnNfnNfnnnnnnnnsnsn-3′ (SEQ ID NO: 6319), wherein “Nf” is a 2′ fluoro-modified nucleoside, “n” is a 2′ O-methyl modified nucleoside, and “s” is a phosphorothioate linkage.

[0175] In some embodiments, the composition comprises an oligonucleotide that inhibits the expression of MST1, wherein the oligonucleotide comprises an siRNA comprising a sense strand and an antisense strand, wherein the antisense strand comprises modification pattern 1AS: 5′-nsNfsnNfnNfnNfnNfnnnNfnNfnNfnsnsn-3′ (SEQ ID NO: 6173), wherein “Nf” is a 2′ fluoro-modified nucleoside, “n” is a 2′ O-methyl modified nucleoside, and “s” is a phosphorothioate linkage. In some embodiments, the antisense strand comprises modification pattern 2AS: 5′-nsNfsnnnNfnNfNfnnnnNfnNfnnnsnsn-3′ (SEQ ID NO: 6174), wherein “Nf” is a 2′ fluoro-modified nucleoside, “n” is a 2′ O-methyl modified nucleoside, and “s” is a phosphorothioate linkage. In some embodiments, the antisense strand comprises modification pattern 3AS: 5′-nsNfsnnnNfnnnnnnnNfnNfnnnsnsn-3′ (SEQ ID NO: 6175), wherein “Nf” is a 2′ fluoro-modified nucleoside, “n” is a 2′ O-methyl modified nucleoside, and “s” is a phosphorothioate linkage. In some embodiments, the antisense strand comprises modification pattern 4AS: 5′-nsNfsnNfnNfnnnnnnnNfnNfnnnsnsn-3′ (SEQ ID NO: 6176), wherein “Nf” is a 2′ fluoro-modified nucleoside, “n” is a 2′ O-methyl modified nucleoside, and “s” is a phosphorothioate linkage. In some embodiments, the antisense strand comprises modification pattern 5AS: 5′-nsNfsnnnnnnnnnnnNfnNfnnnsnsn-3′ (SEQ ID NO: 6177), wherein “Nf” is a 2′ fluoro-modified nucleoside, “n” is a 2′ O-methyl modified nucleoside, and “s” is a phosphorothioate linkage. In some embodiments, the antisense strand comprises modification pattern 6AS: 5′-nsNfsnnnNfnnNfnnnnNfnNfnnnsnsn-3′ (SEQ ID NO: 6178), wherein “Nf” is a 2′ fluoro-modified nucleoside, “n” is a 2′ O-methyl modified nucleoside, and “s” is a phosphorothioate linkage. In some embodiments, the antisense strand comprises modification pattern 7AS: 5′-nsNfsnNfnNfnNfnNfnNfnNfnNfnNfnsnsn-3′ (SEQ ID NO: 6179), wherein “Nf” is a 2′ fluoro-modified nucleoside, “n” is a 2′ O-methyl modified nucleoside, and “s” is a phosphorothioate linkage. In some embodiments, the antisense strand comprises modification pattern 8AS: 5′-nsNfsnnnnnnnnnnnNfnnnnnsnsn-3′ (SEQ ID NO: 6180), wherein “Nf” is a 2′ fluoro-modified nucleoside, “n” is a 2′ O-methyl modified nucleoside, and “s” is a phosphorothioate linkage. In some embodiments, the antisense strand comprises modification pattern 9AS: 5′-nsNfsnNfnnnNfnnnNfnNfnNfnNfnsnsn-3′ (SEQ ID NO: 6345), wherein “Nf” is a 2′ fluoro-modified nucleoside, “n” is a 2′ O-methyl modified nucleoside, and “s” is a phosphorothioate linkage. In some embodiments, the antisense strand comprises modification pattern 10AS: 5′-nsNfsnNfnNfnnnNfnNfnNfnNfnNfnsnsn-3′ (SEQ ID NO: 6346), wherein “Nf” is a 2′ fluoro-modified nucleoside, “n” is a 2′ O-methyl modified nucleoside, and “s” is a phosphorothioate linkage. In some embodiments, the antisense strand comprises modification pattern 11AS: 5′-nsNfsnNfnNfhnnnnNfnNfnNfnNfnsnsn-3′ (SEQ ID NO: 6347), wherein “Nf” is a 2′ fluoro-modified nucleoside, “n” is a 2′ O-methyl modified nucleoside, and “s” is a phosphorothioate linkage. In some embodiments, the antisense strand comprises modification pattern 12AS: 5′-nsNfsnNfnnNfNfnNfnNfnNfnNfnNfnsnsn-3′ (SEQ ID NO: 6348), wherein “Nf” is a 2′ fluoro-modified nucleoside, “n” is a 2′ O-methyl modified nucleoside, and “s” is a phosphorothioate linkage. In some embodiments, the antisense strand comprises modification pattern 13AS: 5′-nsNfsnNfnnnNfnNfnNfnNfnNfnNfnsnsn-3′ (SEQ ID NO: 6349), wherein “Nf” is a 2′ fluoro-modified nucleoside, “n” is a 2′ O-methyl modified nucleoside, and “s” is a phosphorothioate linkage. In some embodiments, the antisense strand comprises modification pattern 14AS: 5′-nsNfsnnNfnNfnnNfnNfnNfnNfnNfnsnsn-3′ (SEQ ID NO: 6350), wherein “Nf” is a 2′ fluoro-modified nucleoside, “n” is a 2′ O-methyl modified nucleoside, and “s” is a phosphorothioate linkage. In some embodiments, the antisense strand comprises modification pattern 15AS: 5′-nsNfsnnnnNfnnNfnNfnNfnNfnNfnsnsn-3′ (SEQ ID NO: 6351), wherein “Nf” is a 2′ fluoro-modified nucleoside, “n” is a 2′ O-methyl modified nucleoside, and “s” is a phosphorothioate linkage. In some embodiments, the antisense strand comprises modification pattern 16AS: 5′-nsNfsnnnNfnnnNfnNfnNfnNfnNfnsnsn-3′ (SEQ ID NO: 6352), wherein “Nf” is a 2′ fluoro-modified nucleoside, “n” is a 2′ O-methyl modified nucleoside, and “s” is a phosphorothioate linkage. In some embodiments, the antisense strand comprises modification pattern 17AS: 5′-nsNfsnNfnnNfnnNfnNfnNfnNfnNfnsnsn-3′ (SEQ ID NO: 6353), wherein “Nf” is a 2′ fluoro-modified nucleoside, “n” is a 2′ O-methyl modified nucleoside, and “s” is a phosphorothioate linkage. In some embodiments, the antisense strand comprises modification pattern 18AS: 5′-nsNfsnnnNfnNfnNfnNfnNfnNfnNfnsnsn-3′ (SEQ ID NO: 6354), wherein “Nf” is a 2′ fluoro-modified nucleoside, “n” is a 2′ O-methyl modified nucleoside, and “s” is a phosphorothioate linkage. In some embodiments, the antisense strand comprises modification pattern 19AS: 5′-nsNfsnNfnNfnNfnnnNfnNfnNfnNfnsnsn-3′ (SEQ ID NO: 6355), wherein “Nf” is a 2′ fluoro-modified nucleoside, “n” is a 2′ O-methyl modified nucleoside, and “s” is a phosphorothioate linkage. In some embodiments, the antisense strand comprises modification pattern 20AS: 5′-nsNfsnnnNfnNfnnnNfnNfnNfnNfnsnsn-3′ (SEQ ID NO: 6356), wherein “Nf” is a 2′ fluoro-modified nucleoside, “n” is a 2′ O-methyl modified nucleoside, and “s” is a phosphorothioate linkage. In some embodiments, the antisense strand comprises modification pattern 21AS: 5′-nsNfsnnNfnnnnNfnNfnNfnNfnNfnsnsn-3′ (SEQ ID NO: 6357), wherein “Nf” is a 2′ fluoro-modified nucleoside, “n” is a 2′ O-methyl modified nucleoside, and “s” is a phosphorothioate linkage.

[0176] In some embodiments, the composition comprises an oligonucleotide that inhibits the expression of MST1, wherein the oligonucleotide comprises an siRNA comprising a sense strand and an antisense strand, wherein the sense strand comprises pattern 1S and the antisense strand comprises pattern 1AS, 2AS, 3AS, 4AS, 5AS, 6AS, 7AS, 8AS, 9AS, 10AS, 11AS, 12AS, 13AS, 14AS, 15AS, 16AS, 17AS, 18AS, 19AS, 20AS, or 21AS. In some embodiments, the sense strand comprises pattern 2S and the antisense strand comprises pattern 1AS, 2AS, 3AS, 4AS, 5AS, 6AS, 7AS, 8AS, 9AS, 10AS, 11AS, 12AS, 13AS, 14AS, 15AS, 16AS, 17AS, 18AS, 19AS, 20AS, or 21AS. In some embodiments, the sense strand comprises pattern 3S and the antisense strand comprises pattern 1AS, 2AS, 3AS, 4AS, 5AS, 6AS, 7AS, 8AS, 9AS, 10AS, 11AS, 12AS, 13AS, 14AS, 15AS, 16AS, 17AS, 18AS, 19AS, 20AS, or 21AS. In some embodiments, the sense strand comprises pattern 4S and the antisense strand comprises pattern 1AS, 2AS, 3AS, 4AS, 5AS, 6AS, 7AS, 8AS, 9AS, 10AS, 11AS, 12AS, 13AS, 14AS, 15AS, 16AS, 17AS, 18AS, 19AS, 20AS, or 21AS. In some embodiments, the sense strand comprises pattern 5S and the antisense strand comprises pattern 1AS, 2AS, 3AS, 4AS, 5AS, 6AS, 7AS, 8AS, 9AS, 10AS, 11AS, 12AS, 13AS, 14AS, 15AS, 16AS, 17AS, 18AS, 19AS, 20AS, or 21AS. In some embodiments, the sense strand comprises pattern 6S and the antisense strand comprises pattern 1AS, 2AS, 3AS, 4AS, 5AS, 6AS, 7AS, 8AS, 9AS, 10AS, 11AS, 12AS, 13AS, 14AS, 15AS, 16AS, 17AS, 18AS, 19AS, 20AS, or 21AS. In some embodiments, the sense strand comprises pattern 7S and the antisense strand comprises pattern 1AS, 2AS, 3AS, 4AS, 5AS, 6AS, 7AS, 8AS, 9AS, 10AS, 11AS, 12AS, 13AS, 14AS, 15AS, 16AS, 17AS, 18AS, 19AS, 20AS, or 21AS. In some embodiments, the sense strand comprises pattern 8S and the antisense strand comprises pattern 1AS, 2AS, 3AS, 4AS, 5AS, 6AS, 7AS, 8AS, 9AS, 10AS, 11AS, 12AS, 13AS, 14AS, 15AS, 16AS, 17AS, 18AS, 19AS, 20AS, or 21AS. In some embodiments, the sense strand comprises pattern 9S and the antisense strand comprises pattern 1AS, 2AS, 3AS, 4AS, 5AS, 6AS, 7AS, 8AS, 9AS, 10AS, 11AS, 12AS, 13AS, 14AS, 15AS, 16AS, 17AS, 18AS, 19AS, 20AS, or 21AS. In some embodiments, the sense strand comprises pattern 10S and the antisense strand comprises pattern 1AS, 2AS, 3AS, 4AS, 5AS, 6AS, 7AS, 8AS, 9AS, 10AS, 11AS, 12AS, 13AS, 14AS, 15AS, 16AS, 17AS, 18AS, 19AS, 20AS, or 21AS. In some embodiments, the sense strand comprises pattern 11 S and the antisense strand comprises pattern 1AS, 2AS, 3AS, 4AS, 5AS, 6AS, 7AS, 8AS, 9AS, 10AS, 11AS, 12AS, 13AS, 14AS, 15AS, 16AS, 17AS, 18AS, 19AS, 20AS, or 21AS. In some embodiments, the sense strand comprises pattern 12S and the antisense strand comprises pattern 1AS, 2AS, 3AS, 4AS, 5AS, 6AS, 7AS, 8AS, 9AS, 10AS, 11AS, 12AS, 13AS, 14AS, 15AS, 16AS, 17AS, 18AS, 19AS, 20AS, or 21AS. In some embodiments, the sense strand comprises pattern 13S and the antisense strand comprises pattern 1AS, 2AS, 3AS, 4AS, 5AS, 6AS, 7AS, 8AS, 9AS, 10AS, 11AS, 12AS, 13AS, 14AS, 15AS, 16AS, 17AS, 18AS, 19AS, 20AS, or 21AS. In some embodiments, the sense strand comprises pattern 14S and the antisense strand comprises pattern 1AS, 2AS, 3AS, 4AS, 5AS, 6AS, 7AS, 8AS, 9AS, 10AS, 11AS, 12AS, 13AS, 14AS, 15AS, 16AS, 17AS, 18AS, 19AS, 20AS, or 21AS. In some embodiments, the sense strand comprises pattern 15S and the antisense strand comprises pattern 1AS, 2AS, 3AS, 4AS, 5AS, 6AS, 7AS, 8AS, 9AS, 10AS, 11AS, 12AS, 13AS, 14AS, 15AS, 16AS, 17AS, 18AS, 19AS, 20AS, or 21AS. In some embodiments, the sense strand comprises pattern 16S and the antisense strand comprises pattern 1AS, 2AS, 3AS, 4AS, 5AS, 6AS, 7AS, 8AS, 9AS, 10AS, 11AS, 12AS, 13AS, 14AS, 15AS, 16AS, 17AS, 18AS, 19AS, 20AS, or 21AS. In some embodiments, the sense strand comprises pattern 17S and the antisense strand comprises pattern 1AS, 2AS, 3AS, 4AS, 5AS, 6AS, 7AS, 8AS, 9AS, 10AS, 11AS, 12AS, 13AS, 14AS, 15AS, 16AS, 17AS, 18AS, 19AS, 20AS, or 21AS. In some embodiments, the sense strand comprises pattern 18S and the antisense strand comprises pattern 1AS, 2AS, 3AS, 4AS, 5AS, 6AS, 7AS, 8AS, 9AS, 10AS, 11AS, 12AS, 13AS, 14AS, 15AS, 16AS, 17AS, 18AS, 19AS, 20AS, or 21AS. In some embodiments, the sense strand comprises pattern 19S and the antisense strand comprises pattern 1AS, 2AS, 3AS, 4AS, 5AS, 6AS, 7AS, 8AS, 9AS, 10AS, 11AS, 12AS, 13AS, 14AS, 15AS, 16AS, 17AS, 18AS, 19AS, 20AS, or 21AS. In some embodiments, the sense strand comprises pattern 20S and the antisense strand comprises pattern 1AS, 2AS, 3AS, 4AS, 5AS, 6AS, 7AS, 8AS, 9AS, 10AS, 11AS, 12AS, 13AS, 14AS, 15AS, 16AS, 17AS, 18AS, 19AS, 20AS, or 21AS. In some embodiments, the sense strand comprises pattern 21S and the antisense strand comprises pattern 1AS, 2AS, 3AS, 4AS, 5AS, 6AS, 7AS, 8AS, 9AS, 10AS, 11AS, 12AS, 13AS, 14AS, 15AS, 16AS, 17AS, 18AS, 19AS, 20AS, or 21AS. In some embodiments, the sense strand comprises pattern 22S and the antisense strand comprises pattern 1AS, 2AS, 3AS, 4AS, 5AS, 6AS, 7AS, 8AS, 9AS, 10AS, 11AS, 12AS, 13AS, 14AS, 15AS, 16AS, 17AS, 18AS, 19AS, 20AS, or 21AS. In some embodiments, the sense strand comprises pattern 23S and the antisense strand comprises pattern 1AS, 2AS, 3AS, 4AS, 5AS, 6AS, 7AS, 8AS, 9AS, 10AS, 11AS, 12AS, 13AS, 14AS, 15AS, 16AS, 17AS, 18AS, 19AS, 20AS, or 21AS. In some embodiments, the sense strand comprises pattern 24S and the antisense strand comprises pattern 1AS, 2AS, 3AS, 4AS, 5AS, 6AS, 7AS, 8AS, 9AS, 10AS, 11AS, 12AS, 13AS, 14AS, 15AS, 16AS, 17AS, 18AS, 19AS, 20AS, or 21AS. In some embodiments, the sense strand comprises pattern 25S and the antisense strand comprises pattern 1AS, 2AS, 3AS, 4AS, 5AS, 6AS, 7AS, 8AS, 9AS, 10AS, 11AS, 12AS, 13AS, 14AS, 15AS, 16AS, 17AS, 18AS, 19AS, 20AS, or 21AS. In some embodiments, the sense strand comprises pattern 26S and the antisense strand comprises pattern 1AS, 2AS, 3AS, 4AS, 5AS, 6AS, 7AS, 8AS, 9AS, 10AS, 11AS, 12AS, 13AS, 14AS, 15AS, 16AS, 17AS, 18AS, 19AS, 20AS, or 21AS. In some embodiments, the sense strand comprises pattern 27S and the antisense strand comprises pattern 1AS, 2AS, 3AS, 4AS, 5AS, 6AS, 7AS, 8AS, 9AS, 10AS, 11AS, 12AS, 13AS, 14AS, 15AS, 16AS, 17AS, 18AS, 19AS, 20AS, or 21AS. In some embodiments, the sense strand comprises pattern 28S and the antisense strand comprises pattern 1AS, 2AS, 3AS, 4AS, 5AS, 6AS, 7AS, 8AS, 9AS, 10AS, 11AS, 12AS, 13AS, 14AS, 15AS, 16AS, 17AS, 18AS, 19AS, 20AS, or 21AS. In some embodiments, the sense strand comprises pattern 29S and the antisense strand comprises pattern 1AS, 2AS, 3AS, 4AS, 5AS, 6AS, 7AS, 8AS, 9AS, 10AS, 11AS, 12AS, 13AS, 14AS, 15AS, 16AS, 17AS, 18AS, 19AS, 20AS, or 21AS. In some embodiments, the sense strand comprises pattern 30S and the antisense strand comprises pattern 1AS, 2AS, 3AS, 4AS, 5AS, 6AS, 7AS, 8AS, 9AS, 10AS, 11AS, 12AS, 13AS, 14AS, 15AS, 16AS, 17AS, 18AS, 19AS, 20AS, or 21AS. In some embodiments, the sense strand comprises pattern 31S and the antisense strand comprises pattern 1AS, 2AS, 3AS, 4AS, 5AS, 6AS, 7AS, 8AS, 9AS, 10AS, 11AS, 12AS, 13AS, 14AS, 15AS, 16AS, 17AS, 18AS, 19AS, 20AS, or 21AS. In some embodiments, the sense strand comprises pattern 32S and the antisense strand comprises pattern 1AS, 2AS, 3AS, 4AS, 5AS, 6AS, 7AS, 8AS, 9AS, 10AS, 11AS, 12AS, 13AS, 14AS, 15AS, 16AS, 17AS, 18AS, 19AS, 20AS, or 21AS. In some embodiments, the sense strand comprises pattern 33S and the antisense strand comprises pattern 1AS, 2AS, 3AS, 4AS, 5AS, 6AS, 7AS, 8AS, 9AS, 10AS, 11AS, 12AS, 13AS, 14AS, 15AS, 16AS, 17AS, 18AS, 19AS, 20AS, or 21AS. In some embodiments, the sense strand comprises pattern 34S and the antisense strand comprises pattern 1AS, 2AS, 3AS, 4AS, 5AS, 6AS, 7AS, 8AS, 9AS, 10AS, 11AS, 12AS, 13AS, 14AS, 15AS, 16AS, 17AS, 18AS, 19AS, 20AS, or 21AS. In some embodiments, the sense strand comprises pattern 35S and the antisense strand comprises pattern 1AS, 2AS, 3AS, 4AS, 5AS, 6AS, 7AS, 8AS, 9AS, 10AS, 11AS, 12AS, 13AS, 14AS, 15AS, 16AS, 17AS, 18AS, 19AS, 20AS, or 21AS.

[0177] In some embodiments, the sense strand comprises pattern 1S, 2S, 3S, 4S, 5S, 6S, 7S, 8S, 9S, 10S, 11S, 12S, 13S, 14S, 15S, 16S, 17S, 18S, 19S, 20S, 21S, 22S, 23S, 24S, 25S, 26S, 27S, 28S, 29S, 30S, 31S, 32S, 33S, 34S, or 35S and the antisense strand comprises pattern 1AS. In some embodiments, the sense strand comprises pattern 1S, 2S, 3S, 4S, 5S, 6S, 7S, 8S, 9S, 10S, 11S, 12S, 13S, 14S, 15S, 16S, 17S, 18S, 19S, 20S, 21S, 22S, 23S, 24S, 25S, 26S, 27S, 28S, 29S, 30S, 31S, 32S, 33S, 34S, or 35S and the antisense strand comprises pattern 2AS. In some embodiments, the sense strand comprises pattern 1S, 2S, 3S, 4S, 5S, 6S, 7S, 8S, 9S, 10S, 11S, 12S, 13S, 14S, 15S, 16S, 17S, 18S, 19S, 20S, 21S, 22S, 23S, 24S, 25S, 26S, 27S, 28S, 29S, 30S, 31S, 32S, 33S, 34S, or 35S and the antisense strand comprises pattern 3AS. In some embodiments, the sense strand comprises pattern 1S, 2S, 3S, 4S, 5S, 6S, 7S, 8S, 9S, 10S, 11S, 12S, 13S, 14S, 15S, 16S, 17S, 18S, 19S, 20S, 21S, 22S, 23S, 24S, 25S, 26S, 27S, 28S, 29S, 30S, 31S, 32S, 33S, 34S, or 35S and the antisense strand comprises pattern 4AS. In some embodiments, the sense strand comprises pattern 1S, 2S, 3S, 4S, 5S, 6S, 7S, 8S, 9S, 10S, 11S, 12S, 13S, 14S, 15S, 16S, 17S, 18S, 19S, 20S, 21S, 22S, 23S, 24S, 25S, 26S, 27S, 28S, 29S, 30S, 31S, 32S, 33S, 34S, or 35S and the antisense strand comprises pattern 5AS. In some embodiments, the sense strand comprises pattern 1S, 2S, 3S, 4S, 5S, 6S, 7S, 8S, 9S, 10S, 11S, 12S, 13S, 14S, 15S, 16S, 17S, 18S, 19S, 20S, 21S, 22S, 23S, 24S, 25S, 26S, 27S, 28S, 29S, 30S, 31S, 32S, 33S, 34S, or 35S and the antisense strand comprises pattern 6AS. In some embodiments, the sense strand comprises pattern 1S, 2S, 3S, 4S, 5S, 6S, 7S, 8S, 9S, 10S, 11S, 12S, 13S, 14S, 15S, 16S, 17S, 18S, 19S, 20S, 21S, 22S, 23S, 24S, 25S, 26S, 27S, 28S, 29S, 30S, 31S, 32S, 33S, 34S, or 35S and the antisense strand comprises pattern 7AS. In some embodiments, the sense strand comprises pattern 1S, 2S, 3S, 4S, 5S, 6S, 7S, 8S, 9S, 10S, 11S, 12S, 13S, 14S, 15S, 16S, 17S, 18S, 19S, 20S, 21S, 22S, 23S, 24S, 25S, 26S, 27S, 28S, 29S, 30S, 31S, 32S, 33S, 34S, or 35S and the antisense strand comprises pattern 8AS. In some embodiments, the sense strand comprises pattern 1S, 2S, 3S, 4S, 5S, 6S, 7S, 8S, 9S, 10S, 1S, 12S, 13S, 14S, 15S, 16S, 17S, 18S, 19S, 20S, 21S, 22S, 23S, 24S, 25S, 26S, 27S, 28S, 29S, 30S, 31S, 32S, 33S, 34S, or 35S and the antisense strand comprises pattern 9AS. In some embodiments, the sense strand comprises pattern 1S, 2S, 3S, 4S, 5S, 6S, 7S, 8S, 9S, 10S, 11S, 12S, 13S, 14S, 15S, 16S, 17S, 18S, 19S, 20S, 21S, 22S, 23S, 24S, 25S, 26S, 27S, 28S, 29S, 30S, 31S, 32S, 33S, 34S, or 35S and the antisense strand comprises pattern 10AS. In some embodiments, the sense strand comprises pattern 1S, 2S, 3S, 4S, 5S, 6S, 7S, 8S, 9S, 10S, 11S, 12S, 13S, 14S, 15S, 16S, 17S, 18S, 19S, 20S, 21S, 22S, 23S, 24S, 25S, 26S, 27S, 28S, 29S, 30S, 31S, 32S, 33S, 34S, or 35S and the antisense strand comprises pattern 11AS. In some embodiments, the sense strand comprises pattern 1S, 2S, 3S, 4S, 5S, 6S, 7S, 8S, 9S, 10S, 1S, 12S, 13S, 14S, 15S, 16S, 17S, 18S, 19S, 20S, 21S, 22S, 23S, 24S, 25S, 26S, 27S, 28S, 29S, 30S, 31S, 32S, 33S, 34S, or 35S and the antisense strand comprises pattern 12AS. In some embodiments, the sense strand comprises pattern 1S, 2S, 3S, 4S, 5S, 6S, 7S, 8S, 9S, 10S, 11S, 12S, 13S, 14S, 15S, 16S, 17S, 18S, 19S, 20S, 21S, 22S, 23S, 24S, 25S, 26S, 27S, 28S, 29S, 30S, 31S, 32S, 33S, 34S, or 35S and the antisense strand comprises pattern 13AS. In some embodiments, the sense strand comprises pattern 1S, 2S, 3S, 4S, 5S, 6S, 7S, 8S, 9S, 10S, 11S, 12S, 13S, 14S, 15S, 16S, 17S, 18S, 19S, 20S, 21S, 22S, 23S, 24S, 25S, 26S, 27S, 28S, 29S, 30S, 31S, 32S, 33S, 34S, or 35S and the antisense strand comprises pattern 14AS. In some embodiments, the sense strand comprises pattern 1S, 2S, 3S, 4S, 5S, 6S, 7S, 8S, 9S, 10S, 1S, 12S, 13S, 14S, 15S, 16S, 17S, 18S, 19S, 20S, 21S, 22S, 23S, 24S, 25S, 26S, 27S, 28S, 29S, 30S, 31S, 32S, 33S, 34S, or 35S and the antisense strand comprises pattern 15AS. In some embodiments, the sense strand comprises pattern 1S, 2S, 3S, 4S, 5S, 6S, 7S, 8S, 9S, 10S, 11S, 12S, 13S, 14S, 15S, 16S, 17S, 18S, 19S, 20S, 21S, 22S, 23S, 24S, 25S, 26S, 27S, 28S, 29S, 30S, 31S, 32S, 33S, 34S, or 35S and the antisense strand comprises pattern 16AS. In some embodiments, the sense strand comprises pattern 1S, 2S, 3S, 4S, 5S, 6S, 7S, 8S, 9S, 10S, 11S, 12S, 13S, 14S, 15S, 16S, 17S, 18S, 19S, 20S, 21S, 22S, 23S, 24S, 25S, 26S, 27S, 28S, 29S, 30S, 31S, 32S, 33S, 34S, or 35S and the antisense strand comprises pattern 17AS. In some embodiments, the sense strand comprises pattern 1S, 2S, 3S, 4S, 5S, 6S, 7S, 8S, 9S, 10S, 1S, 12S, 13S, 14S, 15S, 16S, 17S, 18S, 19S, 20S, 21S, 22S, 23S, 24S, 25S, 26S, 27S, 28S, 29S, 30S, 31S, 32S, 33S, 34S, or 35S and the antisense strand comprises pattern 18AS. In some embodiments, the sense strand comprises pattern 1S, 2S, 3S, 4S, 5S, 6S, 7S, 8S, 9S, 10S, 11S, 12S, 13S, 14S, 15S, 16S, 17S, 18S, 19S, 20S, 21S, 22S, 23S, 24S, 25S, 26S, 27S, 28S, 29S, 30S, 31S, 32S, 33S, 34S, or 35S and the antisense strand comprises pattern 19AS. In some embodiments, the sense strand comprises pattern 1S, 2S, 3S, 4S, 5S, 6S, 7S, 8S, 9S, 10S, 11S, 12S, 13S, 14S, 15S, 16S, 17S, 18S, 19S, 20S, 21S, 22S, 23S, 24S, 25S, 26S, 27S, 28S, 29S, 30S, 31S, 32S, 33S, 34S, or 35S and the antisense strand comprises pattern 20AS. In some embodiments, the sense strand comprises pattern 1S, 2S, 3S, 4S, 5S, 6S, 7S, 8S, 9S, 10S, 1S, 12S, 13S, 14S, 15S, 16S, 17S, 18S, 19S, 20S, 21S, 22S, 23S, 24S, 25S, 26S, 27S, 28S, 29S, 30S, 31S, 32S, 33S, 34S, or 35S and the antisense strand comprises pattern 21AS.

[0178] In some embodiments, the sense strand comprises modification pattern 1AS, 2AS, 3AS, 4AS, 5AS, 6AS, 7AS, 8AS, 9AS, 10AS, 11AS, 12AS, 13AS, 14AS, 15AS, 16AS, 17AS, 18AS, 19AS, 20AS, or 21AS. In some embodiments, the antisense strand comprises modification pattern 1S, 2S, 3S, 4S, 5S, 6S, 7S, 8S, 9S, 10S, 11S, 12S, 13S, 14S, 15S, 16S, 17S, 18S, 19S, 20S, 21S, 22S, 23S, 24S, 25S, 26S, 27S, 28S, 29S, 30S, 31S, 32S, 33S, 34S, or 35S. In some embodiments, the sense strand or the antisense strand comprises modification pattern ASO1.

[0179] In some embodiments, purines of the sense strand comprise 2′ fluoro modified purines. In some embodiments, purines of the sense strand comprise 2′ methyl modified purines. In some embodiments, purines of the sense strand comprise a mixture of 2′ fluoro and 2′ methyl modified purines. In some embodiments, all purines of the sense strand comprise 2′ fluoro modified purines. In some embodiments, all purines of the sense strand comprise 2′ methyl modified purines. In some embodiments, all purines of the sense strand comprise a mixture of 2′ fluoro and 2′ methyl modified purines.

[0180] In some embodiments, pyrimidines of the sense strand comprise 2′ fluoro modified pyrimidines. In some embodiments, pyrimidines of the sense strand comprise 2′ methyl modified pyrimidines. In some embodiments, pyrimidines of the sense strand comprise a mixture of 2′ fluoro and 2′ methyl modified pyrimidines. In some embodiments, all pyrimidines of the sense strand comprise 2′ fluoro modified pyrimidines. In some embodiments, all pyrimidines of the sense strand comprise 2′ methyl modified pyrimidines. In some embodiments, all pyrimidines of the sense strand comprise a mixture of 2′ fluoro and 2′ methyl modified pyrimidines.

[0181] In some embodiments, purines of the sense strand comprise 2′ fluoro modified purines, and pyrimidines of the sense strand comprise a mixture of 2′ fluoro and 2′ methyl modified pyrimidines. In some embodiments, purines of the sense strand comprise 2′ methyl modified purines, and pyrimidines of the sense strand comprise a mixture of 2′ fluoro and 2′ methyl modified pyrimidines. In some embodiments, purines of the sense strand comprise 2′ fluoro modified purines, and pyrimidines of the sense strand comprise 2′ methyl modified pyrimidines. In some embodiments, purines of the sense strand comprise 2′ methyl modified purines, and pyrimidines of the sense strand comprise 2′ fluoro modified pyrimidines. In some embodiments, pyrimidines of the sense strand comprise 2′ fluoro modified pyrimidines, and purines of the sense strand comprise a mixture of 2′ fluoro and 2′ methyl modified purines. In some embodiments, pyrimidines of the sense strand comprise 2′ methyl modified pyrimidines, and purines of the sense strand comprise a mixture of 2′ fluoro and 2′ methyl modified purines. In some embodiments, pyrimidines of the sense strand comprise 2′ fluoro modified pyrimidines, and purines of the sense strand comprise 2′ methyl modified purines. In some embodiments, pyrimidines of the sense strand comprise 2′ methyl modified pyrimidines, and purines of the sense strand comprise 2′ fluoro modified purines.

[0182] In some embodiments, all purines of the sense strand comprise 2′ fluoro modified purines, and all pyrimidines of the sense strand comprise a mixture of 2′ fluoro and 2′ methyl modified pyrimidines. In some embodiments, all purines of the sense strand comprise 2′ methyl modified purines, and all pyrimidines of the sense strand comprise a mixture of 2′ fluoro and 2′ methyl modified pyrimidines. In some embodiments, all purines of the sense strand comprise 2′ fluoro modified purines, and all pyrimidines of the sense strand comprise 2′ methyl modified pyrimidines. In some embodiments, all purines of the sense strand comprise 2′ methyl modified purines, and all pyrimidines of the sense strand comprise 2′ fluoro modified pyrimidines. In some embodiments, all pyrimidines of the sense strand comprise 2′ fluoro modified pyrimidines, and all purines of the sense strand comprise a mixture of 2′ fluoro and 2′ methyl modified purines. In some embodiments, all pyrimidines of the sense strand comprise 2′ methyl modified pyrimidines, and all purines of the sense strand comprise a mixture of 2′ fluoro and 2′ methyl modified purines. In some embodiments, all pyrimidines of the sense strand comprise 2′ fluoro modified pyrimidines, and all purines of the sense strand comprise 2′ methyl modified purines. In some embodiments, all pyrimidines of the sense strand comprise 2′ methyl modified pyrimidines, and all purines of the sense strand comprise 2′ fluoro modified purines.

[0183] In some embodiments, purines of the antisense strand comprise 2′ fluoro modified purines. In some embodiments, purines of the antisense strand comprise 2′ methyl modified purines. In some embodiments, purines of the antisense strand comprise a mixture of 2′ fluoro and 2′ methyl modified purines. In some embodiments, all purines of the antisense strand comprise 2′ fluoro modified purines. In some embodiments, all purines of the antisense strand comprise 2′ methyl modified purines. In some embodiments, all purines of the antisense strand comprise a mixture of 2′ fluoro and 2′ methyl modified purines.

[0184] In some embodiments, pyrimidines of the antisense strand comprise 2′ fluoro modified pyrimidines. In some embodiments, pyrimidines of the antisense strand comprise 2′ methyl modified pyrimidines. In some embodiments, pyrimidines of the antisense strand comprise a mixture of 2′ fluoro and 2′ methyl modified pyrimidines. In some embodiments, all pyrimidines of the antisense strand comprise 2′ fluoro modified pyrimidines. In some embodiments, all pyrimidines of the antisense strand comprise 2′ methyl modified pyrimidines. In some embodiments, all pyrimidines of the antisense strand comprise a mixture of 2′ fluoro and 2′ methyl modified pyrimidines.

[0185] In some embodiments, purines of the antisense strand comprise 2′ fluoro modified purines, and pyrimidines of the antisense strand comprise a mixture of 2′ fluoro and 2′ methyl modified pyrimidines. In some embodiments, purines of the antisense strand comprise 2′ methyl modified purines, and pyrimidines of the antisense strand comprise a mixture of 2′ fluoro and 2′ methyl modified pyrimidines. In some embodiments, purines of the antisense strand comprise 2′ fluoro modified purines, and pyrimidines of the antisense strand comprise 2′ methyl modified pyrimidines. In some embodiments, purines of the antisense strand comprise 2′ methyl modified purines, and pyrimidines of the antisense strand comprise 2′ fluoro modified pyrimidines. In some embodiments, pyrimidines of the antisense strand comprise 2′ fluoro modified pyrimidines, and purines of the antisense strand comprise a mixture of 2′ fluoro and 2′ methyl modified purines. In some embodiments, pyrimidines of the antisense strand comprise 2′ methyl modified pyrimidines, and purines of the antisense strand comprise a mixture of 2′ fluoro and 2′ methyl modified purines. In some embodiments, pyrimidines of the antisense strand comprise 2′ fluoro modified pyrimidines, and purines of the antisense strand comprise 2′ methyl modified purines. In some embodiments, pyrimidines of the antisense strand comprise 2′ methyl modified pyrimidines, and purines of the antisense strand comprise 2′ fluoro modified purines.

[0186] In some embodiments, all purines of the antisense strand comprise 2′ fluoro modified purines, and all pyrimidines of the antisense strand comprise a mixture of 2′ fluoro and 2′ methyl modified pyrimidines. In some embodiments, all purines of the antisense strand comprise 2′ methyl modified purines, and all pyrimidines of the antisense strand comprise a mixture of 2′ fluoro and 2′ methyl modified pyrimidines. In some embodiments, all purines of the antisense strand comprise 2′ fluoro modified purines, and all pyrimidines of the antisense strand comprise 2′ methyl modified pyrimidines. In some embodiments, all purines of the antisense strand comprise 2′ methyl modified purines, and all pyrimidines of the antisense strand comprise 2′ fluoro modified pyrimidines. In some embodiments, all pyrimidines of the antisense strand comprise 2′ fluoro modified pyrimidines, and all purines of the antisense strand comprise a mixture of 2′ fluoro and 2′ methyl modified purines. In some embodiments, all pyrimidines of the antisense strand comprise 2′ methyl modified pyrimidines, and all purines of the antisense strand comprise a mixture of 2′ fluoro and 2′ methyl modified purines. In some embodiments, all pyrimidines of the antisense strand comprise 2′ fluoro modified pyrimidines, and all purines of the antisense strand comprise 2′ methyl modified purines. In some embodiments, all pyrimidines of the antisense strand comprise 2′ methyl modified pyrimidines, and all purines of the antisense strand comprise 2′ fluoro modified purines.

[0187] Disclosed herein, in some embodiments are compositions comprising an oligonucleotide that targets MST1 and when administered to a cell decreases expression of MST1, wherein the oligonucleotide comprises a small interfering RNA (siRNA) comprising a sense strand and an antisense strand, wherein the sense strand comprises a sense strand sequence described herein in which at least one internucleoside linkage is modified and at least one nucleoside is modified, or an sense strand sequence comprising 1 or 2 nucleoside substitutions, additions, or deletions of the oligonucleotide sequence in which at least one internucleoside linkage is modified and at least one nucleoside is modified, and wherein the antisense strand comprises an antisense strand sequence described herein in which at least one internucleoside linkage is modified and at least one nucleoside is modified, or an oligonucleotide sequence comprising 1 or 2 nucleoside substitutions, additions, or deletions of the antisense strand sequence in which at least one internucleoside linkage is modified and at least one nucleoside is modified. Some embodiments relate to methods that include administering the composition to a subject.

[0188] In some embodiments, the siRNA comprises the sense strand and/or the antisense strand sequence of an siRNA in Table 9, or a nucleic acid sequence thereof having 3 or 4 nucleoside substitutions, additions, or deletions. In some embodiments, the siRNA comprises the sense strand and/or the antisense strand sequence of an siRNA in Table 9, or a nucleic acid sequence thereof having 1 or 2 nucleoside substitutions, additions, or deletions. In some embodiments, the siRNA comprises the sense strand and/or the antisense strand sequence of an siRNA in Table 9. The siRNA may include the same internucleoside linkage modifications or nucleoside modifications as those in Table 9. The siRNA may include any different internucleoside linkage modifications or nucleoside modifications different from those in Table 9. The siRNA may include some unmodified internucleoside linkages or nucleosides.

[0189] In some embodiments, the siRNA comprises the sense strand and/or the antisense strand sequence of an siRNA in Table 10, or a nucleic acid sequence thereof having 3 or 4 nucleoside substitutions, additions, or deletions. In some embodiments, the siRNA comprises the sense strand and/or the antisense strand sequence of an siRNA in Table 10, or a nucleic acid sequence thereof having 1 or 2 nucleoside substitutions, additions, or deletions. In some embodiments, the siRNA comprises the sense strand and/or the antisense strand sequence of an siRNA in Table 10. The siRNA may include the same internucleoside linkage modifications or nucleoside modifications as those in Table 10. The siRNA may include any different internucleoside linkage modifications or nucleoside modifications different from those in Table 10. The siRNA may include some unmodified internucleoside linkages or nucleosides.

[0190] In some embodiments, the siRNA comprises the sense strand and/or the antisense strand sequence of an siRNA in Table 24A, or a nucleic acid sequence thereof having 3 or 4 nucleoside substitutions, additions, or deletions. In some embodiments, the siRNA comprises the sense strand and/or the antisense strand sequence of an siRNA in Table 24A, or a nucleic acid sequence thereof having 1 or 2 nucleoside substitutions, additions, or deletions. In some embodiments, the siRNA comprises the sense strand and/or the antisense strand sequence of an siRNA in Table 24A. The siRNA may include the same internucleoside linkage modifications or nucleoside modifications as those in Table 24A. The siRNA may include any different internucleoside linkage modifications or nucleoside modifications different from those in Table 24A. The siRNA may include some unmodified internucleoside linkages or nucleosides.

[0191] In some embodiments, the siRNA comprises the sense strand and/or the antisense strand sequence of an siRNA in Table 24C, or a nucleic acid sequence thereof having 3 or 4 nucleoside substitutions, additions, or deletions. In some embodiments, the siRNA comprises the sense strand and/or the antisense strand sequence of an siRNA in Table 24C, or a nucleic acid sequence thereof having 1 or 2 nucleoside substitutions, additions, or deletions. In some embodiments, the siRNA comprises the sense strand and/or the antisense strand sequence of an siRNA in Table 24C. The siRNA may include the same internucleoside linkage modifications or nucleoside modifications as those in Table 24C. The siRNA may include any different internucleoside linkage modifications or nucleoside modifications different from those in Table 24C. The siRNA may include some unmodified internucleoside linkages or nucleosides.

[0192] In some embodiments, the siRNA comprises the sense strand and/or the antisense strand sequence of an siRNA in Table 30, or a nucleic acid sequence thereof having 3 or 4 nucleoside substitutions, additions, or deletions. In some embodiments, the siRNA comprises the sense strand and/or the antisense strand sequence of an siRNA in Table 30, or a nucleic acid sequence thereof having 1 or 2 nucleoside substitutions, additions, or deletions. In some embodiments, the siRNA comprises the sense strand and/or the antisense strand sequence of an siRNA in Table 30. The siRNA may include the same internucleoside linkage modifications or nucleoside modifications as those in Table 30. The siRNA may include any different internucleoside linkage modifications or nucleoside modifications different from those in Table 30. The siRNA may include some unmodified internucleoside linkages or nucleosides.

[0193] The siRNA may comprises the sense strand and/or the antisense strand sequence of an siRNA in any table included herein that includes modifications; or may include a nucleic acid sequence thereof having 1 or 2 nucleoside substitutions, additions, or deletions; or may include a nucleic acid sequence thereof having 3 or 4 nucleoside substitutions, additions, or deletions.

[0194] In some embodiments, the siRNA comprises a sense strand having a sequence in accordance with SEQ ID NO: 6208. In some embodiments, the sense strand sequence comprises or consists of sequence at least 75% identical to SEQ ID NO: 6208, at least 80% identical to SEQ ID NO: 6208, at least 85% identical to SEQ ID NO: 6208, at least 90% identical to SEQ ID NO: 6208, or at least 95% identical to SEQ ID NO: 6208. In some embodiments, the sense strand sequence comprises or consists of the sequence of SEQ ID NO 6208, or a sense strand sequence thereof having 1, 2, 3, or 4 nucleoside substitutions, additions, or deletions. In some embodiments, the sense strand sequence comprises or consists of the sequence of SEQ ID NO: 6208, or a sense strand sequence thereof having 1 or 2 nucleoside substitutions, additions, or deletions. In some embodiments, the sense strand sequence comprises or consists of a sequence 100% identical to SEQ ID NO: 6208. The sense strand may comprise a moiety such as a GalNAc moiety or a lipid moiety. In some embodiments, the siRNA comprises an antisense strand having a sequence in accordance with SEQ ID NO: 6267. In some embodiments, the antisense strand sequence comprises or consists of sequence at least 75% identical to SEQ ID NO: 6267, at least 80% identical to SEQ ID NO: 6267, at least 85% identical to SEQ ID NO: 6267, at least 90% identical to SEQ ID NO: 6267, or at least 95% identical to SEQ ID NO: 6267. In some embodiments, the antisense strand sequence comprises or consists of the sequence of SEQ ID NO 6267, or an antisense strand sequence thereof having 1, 2, 3, or 4 nucleoside substitutions, additions, or deletions. In some embodiments, the antisense strand sequence comprises or consists of the sequence of SEQ ID NO: 6267, or an antisense strand sequence thereof having 1 or 2 nucleoside substitutions, additions, or deletions. In some embodiments, the antisense strand sequence comprises or consists of a sequence 100% identical to SEQ ID NO: 6267. The antisense strand may comprise a moiety such as a GalNAc moiety or a lipid moiety.

[0195] In some embodiments, the siRNA comprises a sense strand having a sequence in accordance with SEQ ID NO: 6214. In some embodiments, the sense strand sequence comprises or consists of sequence at least 75% identical to SEQ ID NO: 6214, at least 80% identical to SEQ ID NO: 6214, at least 85% identical to SEQ ID NO: 6214, at least 90% identical to SEQ ID NO: 6214, or at least 95% identical to SEQ ID NO: 6214. In some embodiments, the sense strand sequence comprises or consists of the sequence of SEQ ID NO 6214, or a sense strand sequence thereof having 1, 2, 3, or 4 nucleoside substitutions, additions, or deletions. In some embodiments, the sense strand sequence comprises or consists of the sequence of SEQ ID NO: 6214, or a sense strand sequence thereof having 1 or 2 nucleoside substitutions, additions, or deletions. In some embodiments, the sense strand sequence comprises or consists of a sequence 100% identical to SEQ ID NO: 6214. The sense strand may comprise a moiety such as a GalNAc moiety or a lipid moiety. In some embodiments, the siRNA comprises an antisense strand having a sequence in accordance with SEQ ID NO: 6273. In some embodiments, the antisense strand sequence comprises or consists of sequence at least 75% identical to SEQ ID NO: 6273, at least 80% identical to SEQ ID NO: 6273, at least 85% identical to SEQ ID NO: 6273, at least 90% identical to SEQ ID NO: 6273, or at least 95% identical to SEQ ID NO: 6273. In some embodiments, the antisense strand sequence comprises or consists of the sequence of SEQ ID NO 6273, or an antisense strand sequence thereof having 1, 2, 3, or 4 nucleoside substitutions, additions, or deletions. In some embodiments, the antisense strand sequence comprises or consists of the sequence of SEQ ID NO: 6273, or an antisense strand sequence thereof having 1 or 2 nucleoside substitutions, additions, or deletions. In some embodiments, the antisense strand sequence comprises or consists of a sequence 100% identical to SEQ ID NO: 6273. The antisense strand may comprise a moiety such as a GalNAc moiety or a lipid moiety.

[0196] In some embodiments, the siRNA comprises a sense strand having a sequence in accordance with SEQ ID NO: 6215. In some embodiments, the sense strand sequence comprises or consists of sequence at least 75% identical to SEQ ID NO: 6215, at least 80% identical to SEQ ID NO: 6215, at least 85% identical to SEQ ID NO: 6215, at least 90% identical to SEQ ID NO: 6215, or at least 95% identical to SEQ ID NO: 6215. In some embodiments, the sense strand sequence comprises or consists of the sequence of SEQ ID NO 6215, or a sense strand sequence thereof having 1, 2, 3, or 4 nucleoside substitutions, additions, or deletions. In some embodiments, the sense strand sequence comprises or consists of the sequence of SEQ ID NO: 6215, or a sense strand sequence thereof having 1 or 2 nucleoside substitutions, additions, or deletions. In some embodiments, the sense strand sequence comprises or consists of a sequence 100% identical to SEQ ID NO: 6215. The sense strand may comprise a moiety such as a GalNAc moiety or a lipid moiety. In some embodiments, the siRNA comprises an antisense strand having a sequence in accordance with SEQ ID NO: 6274. In some embodiments, the antisense strand sequence comprises or consists of sequence at least 75% identical to SEQ ID NO: 6274, at least 80% identical to SEQ ID NO: 6274, at least 85% identical to SEQ ID NO: 6274, at least 90% identical to SEQ ID NO: 6274, or at least 95% identical to SEQ ID NO: 6274. In some embodiments, the antisense strand sequence comprises or consists of the sequence of SEQ ID NO 6274, or an antisense strand sequence thereof having 1, 2, 3, or 4 nucleoside substitutions, additions, or deletions. In some embodiments, the antisense strand sequence comprises or consists of the sequence of SEQ ID NO: 6274, or an antisense strand sequence thereof having 1 or 2 nucleoside substitutions, additions, or deletions. In some embodiments, the antisense strand sequence comprises or consists of a sequence 100% identical to SEQ ID NO: 6274. The antisense strand may comprise a moiety such as a GalNAc moiety or a lipid moiety.

[0197] In some embodiments, the siRNA comprises a sense strand having a sequence in accordance with SEQ ID NO: 6216. In some embodiments, the sense strand sequence comprises or consists of sequence at least 75% identical to SEQ ID NO: 6216, at least 80% identical to SEQ ID NO: 6216, at least 85% identical to SEQ ID NO: 6216, at least 90% identical to SEQ ID NO: 6216, or at least 95% identical to SEQ ID NO: 6216. In some embodiments, the sense strand sequence comprises or consists of the sequence of SEQ ID NO 6216, or a sense strand sequence thereof having 1, 2, 3, or 4 nucleoside substitutions, additions, or deletions. In some embodiments, the sense strand sequence comprises or consists of the sequence of SEQ ID NO: 6216, or a sense strand sequence thereof having 1 or 2 nucleoside substitutions, additions, or deletions. In some embodiments, the sense strand sequence comprises or consists of a sequence 100% identical to SEQ ID NO: 6216. The sense strand may comprise a moiety such as a GalNAc moiety or a lipid moiety. In some embodiments, the siRNA comprises an antisense strand having a sequence in accordance with SEQ ID NO: 6275. In some embodiments, the antisense strand sequence comprises or consists of sequence at least 75% identical to SEQ ID NO: 6275, at least 80% identical to SEQ ID NO: 6275, at least 85% identical to SEQ ID NO: 6275, at least 90% identical to SEQ ID NO: 6275, or at least 95% identical to SEQ ID NO: 6275. In some embodiments, the antisense strand sequence comprises or consists of the sequence of SEQ ID NO 6275, or an antisense strand sequence thereof having 1, 2, 3, or 4 nucleoside substitutions, additions, or deletions. In some embodiments, the antisense strand sequence comprises or consists of the sequence of SEQ ID NO: 6275, or an antisense strand sequence thereof having 1 or 2 nucleoside substitutions, additions, or deletions. In some embodiments, the antisense strand sequence comprises or consists of a sequence 100% identical to SEQ ID NO: 6275. The antisense strand may comprise a moiety such as a GalNAc moiety or a lipid moiety.

[0198] In some embodiments, the siRNA comprises a sense strand having a sequence in accordance with SEQ ID NO: 6229. In some embodiments, the sense strand sequence comprises or consists of sequence at least 75% identical to SEQ ID NO: 6229, at least 80% identical to SEQ ID NO: 6229, at least 85% identical to SEQ ID NO: 6229, at least 90% identical to SEQ ID NO: 6229, or at least 95% identical to SEQ ID NO: 6229. In some embodiments, the sense strand sequence comprises or consists of the sequence of SEQ ID NO 6229, or a sense strand sequence thereof having 1, 2, 3, or 4 nucleoside substitutions, additions, or deletions. In some embodiments, the sense strand sequence comprises or consists of the sequence of SEQ ID NO: 6229, or a sense strand sequence thereof having 1 or 2 nucleoside substitutions, additions, or deletions. In some embodiments, the sense strand sequence comprises or consists of a sequence 100% identical to SEQ ID NO: 6229. The sense strand may comprise a moiety such as a GalNAc moiety or a lipid moiety. In some embodiments, the siRNA comprises an antisense strand having a sequence in accordance with SEQ ID NO: 6288. In some embodiments, the antisense strand sequence comprises or consists of sequence at least 75% identical to SEQ ID NO: 6288, at least 80% identical to SEQ ID NO: 6288, at least 85% identical to SEQ ID NO: 6288, at least 90% identical to SEQ ID NO: 6288, or at least 95% identical to SEQ ID NO: 6288. In some embodiments, the antisense strand sequence comprises or consists of the sequence of SEQ ID NO 6288, or an antisense strand sequence thereof having 1, 2, 3, or 4 nucleoside substitutions, additions, or deletions. In some embodiments, the antisense strand sequence comprises or consists of the sequence of SEQ ID NO: 6288, or an antisense strand sequence thereof having 1 or 2 nucleoside substitutions, additions, or deletions. In some embodiments, the antisense strand sequence comprises or consists of a sequence 100% identical to SEQ ID NO: 6288. The antisense strand may comprise a moiety such as a GalNAc moiety or a lipid moiety.

[0199] In some embodiments, the siRNA comprises a sense strand having a sequence in accordance with SEQ ID NO: 6234. In some embodiments, the sense strand sequence comprises or consists of sequence at least 75% identical to SEQ ID NO: 6234, at least 80% identical to SEQ ID NO: 6234, at least 85% identical to SEQ ID NO: 6234, at least 90% identical to SEQ ID NO: 6234, or at least 95% identical to SEQ ID NO: 6234. In some embodiments, the sense strand sequence comprises or consists of the sequence of SEQ ID NO 6234, or a sense strand sequence thereof having 1, 2, 3, or 4 nucleoside substitutions, additions, or deletions. In some embodiments, the sense strand sequence comprises or consists of the sequence of SEQ ID NO: 6234, or a sense strand sequence thereof having 1 or 2 nucleoside substitutions, additions, or deletions. In some embodiments, the sense strand sequence comprises or consists of a sequence 100% identical to SEQ ID NO: 6234. The sense strand may comprise a moiety such as a GalNAc moiety or a lipid moiety. In some embodiments, the siRNA comprises an antisense strand having a sequence in accordance with SEQ ID NO: 6293. In some embodiments, the antisense strand sequence comprises or consists of sequence at least 75% identical to SEQ ID NO: 6293, at least 80% identical to SEQ ID NO: 6293, at least 85% identical to SEQ ID NO: 6293, at least 90% identical to SEQ ID NO: 6293, or at least 95% identical to SEQ ID NO: 6293. In some embodiments, the antisense strand sequence comprises or consists of the sequence of SEQ ID NO 6293, or an antisense strand sequence thereof having 1, 2, 3, or 4 nucleoside substitutions, additions, or deletions. In some embodiments, the antisense strand sequence comprises or consists of the sequence of SEQ ID NO: 6293, or an antisense strand sequence thereof having 1 or 2 nucleoside substitutions, additions, or deletions. In some embodiments, the antisense strand sequence comprises or consists of a sequence 100% identical to SEQ ID NO: 6293. The antisense strand may comprise a moiety such as a GalNAc moiety or a lipid moiety.

[0200] In some embodiments, the siRNA comprises a sense strand having a sequence in accordance with SEQ ID NO: 6238. In some embodiments, the sense strand sequence comprises or consists of sequence at least 75% identical to SEQ ID NO: 6238, at least 80% identical to SEQ ID NO: 6238, at least 85% identical to SEQ ID NO: 6238, at least 90% identical to SEQ ID NO: 6238, or at least 95% identical to SEQ ID NO: 6238. In some embodiments, the sense strand sequence comprises or consists of the sequence of SEQ ID NO 6238, or a sense strand sequence thereof having 1, 2, 3, or 4 nucleoside substitutions, additions, or deletions. In some embodiments, the sense strand sequence comprises or consists of the sequence of SEQ ID NO: 6238, or a sense strand sequence thereof having 1 or 2 nucleoside substitutions, additions, or deletions. In some embodiments, the sense strand sequence comprises or consists of a sequence 100% identical to SEQ ID NO: 6238. The sense strand may comprise a moiety such as a GalNAc moiety or a lipid moiety. In some embodiments, the siRNA comprises an antisense strand having a sequence in accordance with SEQ ID NO: 6297. In some embodiments, the antisense strand sequence comprises or consists of sequence at least 75% identical to SEQ ID NO: 6297, at least 80% identical to SEQ ID NO: 6297, at least 85% identical to SEQ ID NO: 6297, at least 90% identical to SEQ ID NO: 6297, or at least 95% identical to SEQ ID NO: 6297. In some embodiments, the antisense strand sequence comprises or consists of the sequence of SEQ ID NO 6297, or an antisense strand sequence thereof having 1, 2, 3, or 4 nucleoside substitutions, additions, or deletions. In some embodiments, the antisense strand sequence comprises or consists of the sequence of SEQ ID NO: 6297, or an antisense strand sequence thereof having 1 or 2 nucleoside substitutions, additions, or deletions. In some embodiments, the antisense strand sequence comprises or consists of a sequence 100% identical to SEQ ID NO: 6297. The antisense strand may comprise a moiety such as a GalNAc moiety or a lipid moiety.

[0201] In some embodiments, the siRNA comprises a sense strand having a sequence in accordance with SEQ ID NO: 6244. In some embodiments, the sense strand sequence comprises or consists of sequence at least 75% identical to SEQ ID NO: 6244, at least 80% identical to SEQ ID NO: 6244, at least 85% identical to SEQ ID NO: 6244, at least 90% identical to SEQ ID NO: 6244, or at least 95% identical to SEQ ID NO: 6244. In some embodiments, the sense strand sequence comprises or consists of the sequence of SEQ ID NO 6244, or a sense strand sequence thereof having 1, 2, 3, or 4 nucleoside substitutions, additions, or deletions. In some embodiments, the sense strand sequence comprises or consists of the sequence of SEQ ID NO: 6244, or a sense strand sequence thereof having 1 or 2 nucleoside substitutions, additions, or deletions. In some embodiments, the sense strand sequence comprises or consists of a sequence 100% identical to SEQ ID NO: 6244. The sense strand may comprise a moiety such as a GalNAc moiety or a lipid moiety. In some embodiments, the siRNA comprises an antisense strand having a sequence in accordance with SEQ ID NO: 6303. In some embodiments, the antisense strand sequence comprises or consists of sequence at least 75% identical to SEQ ID NO: 6303, at least 80% identical to SEQ ID NO: 6303, at least 85% identical to SEQ ID NO: 6303, at least 90% identical to SEQ ID NO: 6303, or at least 95% identical to SEQ ID NO: 6303. In some embodiments, the antisense strand sequence comprises or consists of the sequence of SEQ ID NO 6303, or an antisense strand sequence thereof having 1, 2, 3, or 4 nucleoside substitutions, additions, or deletions. In some embodiments, the antisense strand sequence comprises or consists of the sequence of SEQ ID NO: 6303, or an antisense strand sequence thereof having 1 or 2 nucleoside substitutions, additions, or deletions. In some embodiments, the antisense strand sequence comprises or consists of a sequence 100% identical to SEQ ID NO: 6303. The antisense strand may comprise a moiety such as a GalNAc moiety or a lipid moiety.

### 4. ASO Modification Patterns

[0202] In some embodiments, the composition comprises an oligonucleotide that inhibits the expression of MST1, wherein the oligonucleotide comprises an antisense oligonucleotide (ASO). In some embodiments, the ASO comprises modification pattern ASO1: 5′-nsnsnsnsnsdNsdNsdNsdNsdNsdNsdNsdNsdNsdNsnsnsnsnsn-3′ (SEQ ID NO: 6181), wherein “dN” is any deoxynucleotide, “n” is a 2′O-methyl or 2′O-methoxyethyl-modified nucleoside, and “s” is a phosphorothioate linkage. In some embodiments, the ASO comprises modification pattern 1S, 2S, 3S, 4S, 5S, 6S, 7S, 8S, 9S, 10S, 1S, 12S, 13S, 14S, 15S, 16S, 17S, 18S, 19S, 20S, 21S, 22S, 23S, 24S, 25S, 26S, 27S, 28S, 29S, 30S, 31S, 32S, 33S, 34S, 35S, 1AS, 2AS, 3AS, 4AS, 5AS, 6AS, 7AS, 8AS, 9AS, 10AS, 11AS, 12AS, 12AS, 14AS, 15AS, 16AS, 17AS, 18AS, 19AS, 20AS, or, 21AS.

### D. Formulations

[0203] In some embodiments, the composition is a pharmaceutical composition. In some embodiments, the composition is sterile. In some embodiments, the composition further comprises a pharmaceutically acceptable carrier.

[0204] In some embodiments, the pharmaceutically acceptable carrier comprises water. In some embodiments, the pharmaceutically acceptable carrier comprises a buffer. In some embodiments, the pharmaceutically acceptable carrier comprises a saline solution. In some embodiments, the pharmaceutically acceptable carrier comprises water, a buffer, or a saline solution. In some embodiments, the composition comprises a liposome. In some embodiments, the pharmaceutically acceptable carrier comprises liposomes, lipids, nanoparticles, proteins, protein-antibody complexes, peptides, cellulose, nanogel, or a combination thereof. In some embodiments, the oligonucleotide is combined with lipids, nanoparticles, polymers, liposomes, micelles, or another delivery system.

[0205] In some embodiments, the composition is formulated for delivery to a subject's lungs. In some embodiments, the composition is formulated for inhalation. In some embodiments, the composition is formulated for aerosolization. In some embodiments, the composition is formulated for administration by a nebulizer.

### II. Methods and Uses

[0206] Disclosed herein, in some embodiments, are methods of administering a composition described herein to a subject. Some embodiments relate to use a composition described herein, such as administering the composition to a subject.

[0207] Some embodiments relate to a method of treating a disorder in a subject in need thereof. Some embodiments relate to use of a composition described herein in the method of treatment. Some embodiments include administering a composition described herein to a subject with the disorder. In some embodiments, the administration treats the disorder in the subject. In some embodiments, the composition treats the disorder in the subject.

[0208] In some embodiments, the treatment comprises prevention, inhibition, or reversion of the disorder in the subject. Some embodiments relate to use of a composition described herein in the method of preventing, inhibiting, or reversing the disorder. Some embodiments relate to a method of preventing, inhibiting, or reversing a disorder a disorder in a subject in need thereof. Some embodiments include administering a composition described herein to a subject with the disorder. In some embodiments, the administration prevents, inhibits, or reverses the disorder in the subject. In some embodiments, the composition prevents, inhibits, or reverses the disorder in the subject.

[0209] Some embodiments relate to a method of preventing a disorder a disorder in a subject in need thereof. Some embodiments relate to use of a composition described herein in the method of preventing the disorder. Some embodiments include administering a composition described herein to a subject with the disorder. In some embodiments, the administration prevents the disorder in the subject. In some embodiments, the composition prevents the disorder in the subject.

[0210] Some embodiments relate to a method of inhibiting a disorder a disorder in a subject in need thereof. Some embodiments relate to use of a composition described herein in the method of inhibiting the disorder. Some embodiments include administering a composition described herein to a subject with the disorder. In some embodiments, the administration inhibits the disorder in the subject. In some embodiments, the composition inhibits the disorder in the subject.

[0211] Some embodiments relate to a method of reversing a disorder a disorder in a subject in need thereof. Some embodiments relate to use of a composition described herein in the method of reversing the disorder. Some embodiments include administering a composition described herein to a subject with the disorder. In some embodiments, the administration reverses the disorder in the subject. In some embodiments, the composition reverses the disorder in the subject.

[0212] In some embodiments, the administration is systemic. In some embodiments, the administration is intravenous. In some embodiments, the administration is by injection. In some embodiments, the administration is to a subject's lungs. In some embodiments, the administration is by inhalation. In some embodiments, the administration is performed using a nebulizer.

### A. Disorders

[0213] Some embodiments of the methods described herein include treating a disorder in a subject in need thereof. In some embodiments, the disorder is a lung disorder. Non-limiting examples of lung disorders include chronic obstructive pulmonary disease (COPD), acute exacerbation of COPD, emphysema, chronic bronchitis, asthma, status asthmaticus, asthma-COPD overlap syndrome (ACOS), cough, lung cancer, interstitial lung disease, or pulmonary fibrosis. The lung disorder may include an obstructive airway disorder such as COPD or asthma. In some embodiments, the lung disorder includes COPD. In some embodiments, the lung disorder includes acute exacerbation of COPD. In some embodiments, the lung disorder includes emphysema. In some embodiments, the lung disorder includes chronic bronchitis. In some embodiments, the lung disorder includes asthma. In some embodiments, the lung disorder includes status asthmaticus. In some embodiments, the lung disorder includes ACOS. In some embodiments, the lung disorder includes cough. In some embodiments, the lung disorder includes lung cancer. In some embodiments, the lung disorder includes interstitial lung disease. In some embodiments, the lung disorder includes pulmonary fibrosis. The lung disorder may result from smoking, or from smoke inhalation.

### B. Subjects

[0214] Some embodiments of the methods described herein include treatment of a subject. Non-limiting examples of subjects include vertebrates, animals, mammals, dogs, cats, cattle, rodents, mice, rats, primates, monkeys, and humans. In some embodiments, the subject is a vertebrate. In some embodiments, the subject is an animal. In some embodiments, the subject is a mammal. In some embodiments, the subject is a dog. In some embodiments, the subject is a cat. In some embodiments, the subject is a cattle. In some embodiments, the subject is a mouse. In some embodiments, the subject is a rat. In some embodiments, the subject is a primate. In some embodiments, the subject is a monkey. In some embodiments, the subject is an animal, a mammal, a dog, a cat, cattle, a rodent, a mouse, a rat, a primate, or a monkey. In some embodiments, the subject is a human. In some embodiments, the subject is male. In some embodiments, the subject is female. In some embodiments, the subject is an adult (e.g. at least 18 years old).

### C. Baseline Measurements

[0215] Some embodiments of the methods described herein include obtaining a baseline measurement from a subject. For example, in some embodiments, a baseline measurement is obtained from the subject prior to treating the subject. Non-limiting examples of baseline measurements include a baseline lung function measurement, a baseline leukocyte measurement, a baseline chronic obstructive pulmonary disease (COPD) exacerbation measurement, a baseline asthma exacerbation measurement, a baseline MSP measurement, or a baseline MST1 mRNA measurement.

[0216] In some embodiments, the baseline measurement is obtained directly from the subject. In some embodiments, the baseline measurement is obtained by observation, for example by observation of the subject or of the subject's tissue. In some embodiments, the baseline measurement is obtained noninvasively using an imaging device.

[0217] In some embodiments, the baseline measurement is obtained in a sample from the subject. In some embodiments, the baseline measurement is obtained in one or more histological tissue sections. In some embodiments, the baseline measurement is obtained by performing an assay such as an immunoassay, a colorimetric assay, or a fluorescence assay, on the sample obtained from the subject. In some embodiments, the baseline measurement is obtained by an immunoassay, a colorimetric assay, a fluorescence assay, or a chromatography (e.g. HPLC) assay. In some embodiments, the baseline measurement is obtained by PCR.

[0218] In some embodiments, the baseline measurement is a baseline lung function measurement. In some embodiments, the baseline measurement is a baseline spirometry measurement. The baseline spirometry measurement may be obtained using a spirometer. The spirometer may generate a spirogram comprising a volume-time curve or a flow-volume loop. In some embodiments, the baseline spirometry measurement is obtained by having the subject breathe into a spirometer sensor. Examples of baseline spirometry measurements may include a baseline forced expiratory volume in 1 second (FEV1) measurement, a baseline forced expiratory volume in 1 second percent predicted (FEV1pp) measurement, a baseline forced vital capacity (FVC) measurement, a baseline FEV1/FVC ratio, a baseline forced expiratory volume, or a baseline peak expiratory flow measurement. In some embodiments, the baseline measurement includes a baseline forced expiratory volume in 1 second (FEV1) measurement. In some embodiments, the baseline measurement includes a baseline forced expiratory volume in 1 second percent predicted (FEV1pp) measurement. In some embodiments, the baseline measurement includes a baseline forced vital capacity (FVC) measurement. In some embodiments, the baseline measurement includes a baseline FEV1/FVC ratio. The baseline FEV1/FVC ratio may be below 70% or below 80%, in some cases. In some embodiments, the baseline measurement includes a baseline forced expiratory volume. In some embodiments, the baseline measurement includes a baseline peak expiratory flow measurement.

[0219] In some embodiments, the baseline measurement includes a baseline leukocyte measurement. In some embodiments, the baseline leukocyte measurement includes a baseline circulating leukocyte measurement. In some embodiments, the baseline leukocyte measurement includes a baseline lung tissue leukocyte measurement. In some embodiments, the baseline leukocyte measurement includes a baseline lung fluid (e.g. bronchoalveolar fluid) leukocyte measurement. In some embodiments, the baseline leukocyte measurement includes a baseline leukocyte count. In some embodiments, the baseline leukocyte measurement includes a baseline leukocyte concentration. In some embodiments, the baseline leukocyte measurement includes a baseline leukocyte percentage. The percentage may be in relation to other cells. Examples of leukocytes that may be included in the baseline leukocyte measurement include neutrophils, eosinophils, basophils, monocytes, or lymphocytes. The leukocytes may include neutrophils. The leukocytes may include eosinophils. The leukocytes may include basophils. The leukocytes may include monocytes. The leukocytes may include lymphocytes. In some embodiments, the baseline leukocyte measurement is obtained by an assay such as an immunoassay, a colorimetric assay, or a fluorescence assay. In some embodiments, the baseline leukocyte measurement is high, relative to a control leukocyte measurement. For example, a subject who has not been treated with a composition described herein and who has an inflammatory lung disorder may have a high leukocyte count in the subject's blood or lungs. In some embodiments, the baseline leukocyte measurement is determined in lung tissue or a lung fluid such as bronchoalveolar fluid, and may include a baseline measurement of neutrophils and macrophages.

[0220] In some embodiments, the baseline measurement includes a baseline chronic obstructive pulmonary disease (COPD) exacerbation measurement. A COPD exacerbation may include a COPD flare-up such as an acute increase in severity of a respiratory symptom such as difficulty breathing. The baseline COPD exacerbation measurement may include a baseline number of COPD flare-ups, and may be included in a given time frame such as flare-ups per day, week, month, or year. The baseline COPD exacerbation measurement may include a baseline frequency of COPD exacerbations. The baseline COPD exacerbation measurement may include a baseline measurement of worsening of a respiratory symptom, such as increased dyspnea, cough, sputum volume, or sputum purulence. The baseline COPD exacerbation measurement may include a baseline measurement of an event such as when a the subject's conditions change enough to require a change in treatment. The baseline COPD exacerbation measurement may include a baseline peak flow test, a baseline breath nitric oxide measurement, or a baseline blood oxygen level test.

[0221] In some embodiments, the baseline measurement includes a baseline asthma exacerbation measurement. An asthma exacerbation may include an asthma attack, for example narrowing of a bronchial tube that causes difficulty breathing. The baseline asthma exacerbation measurement may include a baseline number of number of asthma attacks, and may be included in a given time frame such as flare-ups per day, week, month, or year. The baseline asthma exacerbation measurement may include a baseline frequency of asthma exacerbations. The baseline asthma exacerbation measurement may include a baseline bronchial tube measurement such as a bronchial tube diameter, a bronchial tube circumference, or a bronchial tube area measurement. The baseline asthma exacerbation measurement may include a baseline amount of bronchial tube narrowing, such as a percent constriction. The baseline asthma exacerbation measurement may include a baseline wheezing measurement, a baseline coughing measurement, a baseline chest tightening measurement, a baseline shortness of breath measurement, a baseline agitation measurement, a baseline hyperventilation measurement, a baseline heart rate measurement, a baseline lung function measurement, or a baseline measurement of difficulty speaking or breathing. The baseline asthma exacerbation measurement may include a baseline peak flow test, a baseline breath nitric oxide measurement, or a baseline blood oxygen level test.

[0222] In some embodiments, the baseline measurement is a baseline MSP measurement. In some embodiments, the baseline MSP measurement comprises a baseline MSP level. In some embodiments, the baseline MSP level is indicated as a mass or percentage of MSP per sample weight. In some embodiments, the baseline MSP level is indicated as a mass or percentage of MSP per sample volume. In some embodiments, the baseline MSP level is indicated as a mass or percentage of MSP per total protein within the sample. In some embodiments, the baseline MSP measurement is a baseline circulating MSP measurement. In some embodiments, the baseline MSP measurement is obtained by an assay such as an immunoassay, a colorimetric assay, or a fluorescence assay.

[0223] In some embodiments, the baseline measurement is a baseline MST1 mRNA measurement. In some embodiments, the baseline MST1 mRNA measurement comprises a baseline MST1 mRNA level. In some embodiments, the baseline MST1 mRNA level is indicated as an amount or percentage of MST1 mRNA per sample weight. In some embodiments, the baseline MST1 mRNA level is indicated as an amount or percentage of MST1 mRNA per sample volume. In some embodiments, the baseline MST1 mRNA level is indicated as an amount or percentage of MST1 mRNA per total mRNA within the sample. In some embodiments, the baseline MST1 mRNA level is indicated as an amount or percentage of MST1 mRNA per total nucleic acids within the sample. In some embodiments, the baseline MST1 mRNA level is indicated relative to another mRNA level, such as an mRNA level of a housekeeping gene, within the sample. In some embodiments, the baseline MST1 mRNA measurement is obtained by an assay such as a polymerase chain reaction (PCR) assay. In some embodiments, the PCR comprises quantitative PCR (qPCR). In some embodiments, the PCR comprises reverse transcription of the MST1 mRNA.

[0224] Some embodiments of the methods described herein include obtaining a sample from a subject. In some embodiments, the baseline measurement is obtained in a sample obtained from the subject. In some embodiments, the sample is obtained from the subject prior to administration or treatment of the subject with a composition described herein. In some embodiments, a baseline measurement is obtained in a sample obtained from the subject prior to administering the composition to the subject.

[0225] In some embodiments, the sample comprises a fluid. In some embodiments, the sample is a fluid sample. For example, the baseline MSP measurement may be obtained in a fluid sample obtained from the patient. In some embodiments, the baseline MST1 mRNA measurement is obtained in a fluid sample. In some embodiments, the sample is a blood, plasma, or serum sample. In some embodiments, the baseline MST1 mRNA measurement is obtained in a fluid sample. In some embodiments, the sample comprises blood. In some embodiments, the sample is a blood sample. In some embodiments, the sample is a whole-blood sample. In some embodiments, the blood is fractionated or centrifuged. In some embodiments, the sample comprises plasma. In some embodiments, the sample is a plasma sample. A blood sample may be a plasma sample. In some embodiments, the sample comprises serum. In some embodiments, the sample is a serum sample. A blood sample may be a serum sample. In some embodiments, the fluid sample includes a lung fluid sample. In some embodiments, the lung fluid sample includes alveolar fluid. In some embodiments, the lung fluid sample includes bronchial fluid. In some embodiments, the lung fluid sample includes bronchoalveolar fluid. The lung fluid may be obtained via a lavage method such as a bronchoalveolar lavage method. The lavage method may include the use of a bronchoscope.

[0226] In some embodiments, the sample comprises a tissue. In some embodiments, the sample is a tissue sample. In some embodiments, the tissue comprises liver, lung, or vascular tissue. For example, the baseline MST1 mRNA measurement, or the baseline MSP measurement, may be obtained in a lung or liver sample obtained from the patient. In some embodiments, the tissue comprises liver tissue. The liver may include hepatocytes. In some embodiments, the tissue comprises lung tissue. The lung may include lung epithelial cells, type I alveolar cells, type II alveolar cells, macrophages, alveolar macrophages, goblet cells, club cells, or fibroblasts. In some embodiments, the tissue comprises vascular tissue. The vascular tissue may include vascular endothelial cells. For example, the lung tissue may include vascular endothelial cells.

[0227] In some embodiments, the sample includes cells. In some embodiments, the sample comprises a cell. In some embodiments, the cell is a liver cell. In some embodiments, the liver cell is a hepatocyte. In some embodiments, the cell is a lung cell. In some embodiments, the lung cell is a lung epithelial cell. In some embodiments, the lung cell is a type I alveolar cell. In some embodiments, the lung cell is a type II alveolar cell. In some embodiments, the lung cell is a macrophage. In some embodiments, the lung cell is a alveolar macrophage. In some embodiments, the lung cell is a goblet cell. In some embodiments, the lung cell is a club cell. In some embodiments, the lung cell is a fibroblast. In some embodiments, the cell is a vasculature cell. In some embodiments, the vasculature cell is an endothelial cell.

### D. Effects

[0228] In some embodiments, the composition or administration of the composition affects a measurement such as a lung function measurement, a leukocyte measurement, a chronic obstructive pulmonary disease (COPD) exacerbation measurement, an asthma exacerbation measurement, a MSP measurement (for example, circulating or tissue MSP levels), or a MST1 mRNA measurement, relative to the baseline measurement.

[0229] Some embodiments of the methods described herein include obtaining the measurement from a subject. For example, the measurement may be obtained from the subject after treating the subject. In some embodiments, the measurement is obtained in a second sample (such as a fluid or tissue sample described herein) obtained from the subject after the composition is administered to the subject. In some embodiments, the measurement is an indication that the disorder has been treated.

[0230] In some embodiments, the measurement is obtained directly from the subject. In some embodiments, the measurement is obtained noninvasively using an imaging device. In some embodiments, the measurement is obtained in a second sample from the subject. In some embodiments, the measurement is obtained in one or more histological tissue sections. In some embodiments, the measurement is obtained by performing an assay on the second sample obtained from the subject. In some embodiments, the measurement is obtained by an assay, such as an assay described herein. In some embodiments, the assay is an immunoassay, a colorimetric assay, a fluorescence assay, a chromatography (e.g. HPLC) assay, or a PCR assay. In some embodiments, the measurement is obtained by an assay such as an immunoassay, a colorimetric assay, a fluorescence assay, or a chromatography (e.g. HPLC) assay. In some embodiments, the measurement is obtained by PCR. In some embodiments, the measurement is obtained by histology. In some embodiments, the measurement is obtained by observation. In some embodiments, additional measurements are made, such as in a 3rd sample, a 4th sample, or a fifth sample.

[0231] In some embodiments, the measurement is obtained within 1 hour, within 2 hours, within 3 hours, within 4 hours, within 5 hours, within 6 hours, within 12 hours, within 18 hours, or within 24 hours after the administration of the composition. In some embodiments, the measurement is obtained within 1 day, within 2 days, within 3 days, within 4 days, within 5 days, within 6 days, or within 7 days after the administration of the composition. In some embodiments, the measurement is obtained within 1 week, within 2 weeks, within 3 weeks, within 1 month, within 2 months, within 3 months, within 6 months, within 1 year, within 2 years, within 3 years, within 4 years, or within 5 years after the administration of the composition. In some embodiments, the measurement is obtained after 1 hour, after 2 hours, after 3 hours, after 4 hours, after 5 hours, after 6 hours, after 12 hours, after 18 hours, or after 24 hours after the administration of the composition. In some embodiments, the measurement is obtained after 1 day, after 2 days, after 3 days, after 4 days, after 5 days, after 6 days, or after 7 days after the administration of the composition. In some embodiments, the measurement is obtained after 1 week, after 2 weeks, after 3 weeks, after 1 month, after 2 months, after 3 months, after 6 months, after 1 year, after 2 years, after 3 years, after 4 years, or after 5 years, following the administration of the composition.

[0232] In some embodiments, the composition reduces the measurement relative to the baseline measurement. For example, an adverse phenotype of a lung disorder may be reduced upon administration of the composition. In some embodiments, the reduction is measured in a second sample obtained from the subject after administering the composition to the subject. In some embodiments, the reduction is measured directly in the subject after administering the composition to the subject. In some embodiments, the measurement is decreased by about 2.5% or more, about 5% or more, or about 7.5% or more, relative to the baseline measurement. In some embodiments, the measurement is decreased by about 10% or more, relative to the baseline measurement. In some embodiments, the measurement is decreased by about 20% or more, about 30% or more, about 40% or more, about 50% or more, about 60% or more, about 70% or more, about 80% or more, about 90% or more, relative to the baseline measurement. In some embodiments, the measurement is decreased by no more than about 2.5%, no more than about 5%, or no more than about 7.5%, relative to the baseline measurement. In some embodiments, the measurement is decreased by no more than about 10%, relative to the baseline measurement. In some embodiments, the measurement is decreased by no more than about 20%, no more than about 30%, no more than about 40%, no more than about 50%, no more than about 60%, no more than about 70%, no more than about 80%, no more than about 90%, or no more than about 100% relative to the baseline measurement. In some embodiments, the measurement is decreased by 2.5%, 5%, 7.5%, 10%, 20%, 30%, 40%, 50%, 60%, 70%, 80%, 90%, or 100%, or by a range defined by any of the two aforementioned percentages.

[0233] In some embodiments, the composition increases the measurement relative to the baseline measurement. For example, a protective lung phenotype may be increased upon administration of the composition. In some embodiments, the increase is measured in a second sample obtained from the subject after administering the composition to the subject. In some embodiments, the increase is measured directly in the subject after administering the composition to the subject. In some embodiments, the measurement is increased by about 2.5% or more, about 5% or more, or about 7.5% or more, relative to the baseline measurement. In some embodiments, the measurement is increased by about 10% or more, relative to the baseline measurement. In some embodiments, the measurement is increased by about 20% or more, about 30% or more, about 40% or more, about 50% or more, about 60% or more, about 70% or more, about 80% or more, about 90% or more, relative to the baseline measurement. In some embodiments, the measurement is increased by about 100% or more, increased by about 250% or more, increased by about 500% or more, increased by about 750% or more, or increased by about 1000% or more, relative to the baseline measurement. In some embodiments, the measurement is increased by no more than about 2.5%, no more than about 5%, or no more than about 7.5%, relative to the baseline measurement. In some embodiments, the measurement is increased by no more than about 10%, relative to the baseline measurement. In some embodiments, the measurement is increased by no more than about 20%, no more than about 30%, no more than about 40%, no more than about 50%, no more than about 60%, no more than about 70%, no more than about 80%, no more than about 90%, or no more than about 100% relative to the baseline measurement. In some embodiments, the measurement is increased by no more than about 100%, increased by no more than about 250%, increased by no more than about 500%, increased by no more than about 750%, or increased by no more than about 1000%, relative to the baseline measurement. In some embodiments, the measurement is increased by 2.5%, 5%, 7.5%, 10%, 20%, 30%, 40%, 50%, 60%, 70%, 80%, 90%, 100%, 250%, 500%, 750%, or 1000%, or by a range defined by any of the two aforementioned percentages.

[0234] In some embodiments, the measurement is a lung function measurement. In some embodiments, the measurement is a spirometry measurement. The spirometry measurement may be obtained using a spirometer. The spirometer may generate a spirogram comprising a volume-time curve or a flow-volume loop. In some embodiments, the spirometry measurement is obtained by having the subject breathe into a spirometer sensor. Examples of spirometry measurements may include a forced expiratory volume in 1 second (FEV1) measurement, a forced expiratory volume in 1 second percent predicted (FEV1pp) measurement, a forced vital capacity (FVC) measurement, a FEV1/FVC ratio, a forced expiratory volume, or a peak expiratory flow measurement. In some embodiments, the measurement includes a forced expiratory volume in 1 second (FEV1) measurement. In some embodiments, the measurement includes a forced expiratory volume in 1 second percent predicted (FEV1pp) measurement. In some embodiments, the measurement includes a forced vital capacity (FVC) measurement. In some embodiments, the measurement includes a FEV1/FVC ratio. The FEV1/FVC ratio may be below 70% or below 80%, in some cases. In some embodiments, the measurement includes a forced expiratory volume. In some embodiments, the measurement includes a peak expiratory flow measurement.

[0235] In some embodiments, the composition increases the lung function measurement relative to the baseline lung function measurement. In some embodiments, the increase is measured directly in the subject after administering the composition to the subject. In some embodiments, the lung function measurement is increased by about 2.5% or more, about 5% or more, or about 7.5% or more, relative to the baseline lung function measurement. In some embodiments, the lung function measurement is increased by about 10% or more, relative to the baseline lung function measurement. In some embodiments, the lung function measurement is increased by about 20% or more, about 30% or more, about 40% or more, about 50% or more, about 60% or more, about 70% or more, about 80% or more, about 90% or more, relative to the baseline lung function measurement. In some embodiments, the lung function measurement is increased by about 100% or more, increased by about 250% or more, increased by about 500% or more, increased by about 750% or more, or increased by about 1000% or more, relative to the baseline lung function measurement. In some embodiments, the lung function measurement is increased by no more than about 2.5%, no more than about 5%, or no more than about 7.5%, relative to the baseline lung function measurement. In some embodiments, the lung function measurement is increased by no more than about 10%, relative to the baseline lung function measurement. In some embodiments, the lung function measurement is increased by no more than about 20%, no more than about 30%, no more than about 40%, no more than about 50%, no more than about 60%, no more than about 70%, no more than about 80%, no more than about 90%, or no more than about 100% relative to the baseline lung function measurement. In some embodiments, the lung function measurement is increased by no more than about 100%, increased by no more than about 250%, increased by no more than about 500%, increased by no more than about 750%, or increased by no more than about 1000%, relative to the baseline lung function measurement. In some embodiments, the lung function measurement is increased by 2.5%, 5%, 7.5%, 10%, 20%, 30%, 40%, 50%, 60%, 70%, 80%, 90%, 100%, 250%, 500%, 750%, or 1000%, or by a range defined by any of the two aforementioned percentages.

[0236] In some embodiments, the measurement includes a leukocyte measurement. In some embodiments, the leukocyte measurement includes a circulating leukocyte measurement. In some embodiments, the leukocyte measurement includes a lung tissue leukocyte measurement. In some embodiments, the leukocyte measurement includes a lung fluid (e.g. bronchoalveolar fluid) leukocyte measurement. In some embodiments, the leukocyte measurement includes a leukocyte count. In some embodiments, the leukocyte measurement includes a leukocyte concentration. In some embodiments, the leukocyte measurement includes a leukocyte percentage. The percentage may be in relation to other cells. Examples of leukocytes that may be included in the leukocyte measurement include neutrophils, eosinophils, basophils, monocytes, or lymphocytes. The leukocytes may include neutrophils. The leukocytes may include eosinophils. The leukocytes may include basophils. The leukocytes may include monocytes. The leukocytes may include lymphocytes. In some embodiments, the leukocyte measurement is obtained by an assay such as an immunoassay, a colorimetric assay, or a fluorescence assay. In some embodiments, the leukocyte measurement is normal, relative to a control leukocyte measurement. For example, a subject who has been treated with a composition described herein and who has an inflammatory lung disorder may have had a high leukocyte count that is now low or normal. In some embodiments, the leukocyte measurement is determined in lung tissue or a lung fluid such as bronchoalveolar fluid, and may include a measurement of neutrophils and macrophages.

[0237] In some embodiments, the composition reduces the leukocyte measurement relative to the baseline leukocyte measurement. In some embodiments, the reduction is measured in a second sample obtained from the subject after administering the composition to the subject. In some embodiments, the leukocyte measurement is decreased by about 2.5% or more, about 5% or more, or about 7.5% or more, relative to the baseline leukocyte measurement. In some embodiments, the leukocyte measurement is decreased by about 10% or more, relative to the baseline leukocyte measurement. In some embodiments, the leukocyte measurement is decreased by about 20% or more, about 30% or more, about 40% or more, about 50% or more, about 60% or more, about 70% or more, or about 80% or more, relative to the baseline leukocyte measurement. In some embodiments, the leukocyte measurement is decreased by no more than about 2.5%, no more than about 5%, or no more than about 7.5%, relative to the baseline leukocyte measurement. In some embodiments, the leukocyte measurement is decreased by no more than about 10%, relative to the baseline leukocyte measurement. In some embodiments, the leukocyte measurement is decreased by no more than about 20%, no more than about 30%, no more than about 40%, no more than about 50%, no more than about 60%, no more than about 70%, or no more than about 80%, relative to the baseline leukocyte measurement. In some embodiments, the leukocyte measurement is decreased by 2.5%, 5%, 7.5%, 10%, 20%, 30%, 40%, 50%, 60%, 70%, 80%, 90%, or 100%, or by a range defined by any of the two aforementioned percentages. In some embodiments, the leukocyte measurement is increased by any of the aforementioned percentages or ranges of percentages, relative to the baseline leukocyte measurement.

[0238] In some embodiments, the measurement includes a chronic obstructive pulmonary disease (COPD) exacerbation measurement. A COPD exacerbation may include a COPD flare-up such as an acute increase in severity of a respiratory symptom such as difficulty breathing. The COPD exacerbation measurement may include a number of COPD flare-ups, and may be included in a given time frame such as flare-ups per day, week, month, or year. The COPD exacerbation measurement may include a frequency of COPD exacerbations. The COPD exacerbation measurement may include a measurement of worsening of a respiratory symptom, such as increased dyspnea, cough, sputum volume, or sputum purulence. The COPD exacerbation measurement may include a measurement of an event such as when a the subject's conditions change enough to require a change in treatment. The COPD exacerbation measurement may include a peak flow test, a breath nitric oxide measurement, or a blood oxygen level test.

[0239] In some embodiments, the composition reduces the COPD exacerbation measurement relative to the baseline COPD exacerbation measurement. In some embodiments, the reduction is measured in a second sample obtained from the subject after administering the composition to the subject. In some embodiments, the reduction is measured directly in the subject after administering the composition to the subject. In some embodiments, the COPD exacerbation measurement is decreased by about 2.5% or more, about 5% or more, or about 7.5% or more, relative to the baseline COPD exacerbation measurement. In some embodiments, the COPD exacerbation measurement is decreased by about 10% or more, relative to the baseline COPD exacerbation measurement. In some embodiments, the COPD exacerbation measurement is decreased by about 20% or more, about 30% or more, about 40% or more, about 50% or more, about 60% or more, about 70% or more, about 80% or more, about 90% or more, relative to the baseline COPD exacerbation measurement. In some embodiments, the COPD exacerbation measurement is decreased by no more than about 2.5%, no more than about 5%, or no more than about 7.5%, relative to the baseline COPD exacerbation measurement. In some embodiments, the COPD exacerbation measurement is decreased by no more than about 10%, relative to the baseline COPD exacerbation measurement. In some embodiments, the COPD exacerbation measurement is decreased by no more than about 20%, no more than about 30%, no more than about 40%, no more than about 50%, no more than about 60%, no more than about 70%, no more than about 80%, no more than about 90%, or no more than about 100% relative to the baseline COPD exacerbation measurement. In some embodiments, the COPD exacerbation measurement is decreased by 2.5%, 5%, 7.5%, 10%, 20%, 30%, 40%, 50%, 60%, 70%, 80%, 90%, or 100%, or by a range defined by any of the two aforementioned percentages.

[0240] In some embodiments, the measurement includes an asthma exacerbation measurement. An asthma exacerbation may include an asthma attack, for example narrowing of a bronchial tube that causes difficulty breathing. The asthma exacerbation measurement may include a number of number of asthma attacks, and may be included in a given time frame such as flare-ups per day, week, month, or year. The asthma exacerbation measurement may include a bronchial tube measurement such as a bronchial tube diameter, a bronchial tube circumference, or a bronchial tube area measurement. The asthma exacerbation measurement may include an amount of bronchial tube narrowing, such as a percent constriction. The asthma exacerbation measurement may include a wheezing measurement, a coughing measurement, a chest tightening measurement, a shortness of breath measurement, a agitation measurement, a hyperventilation measurement, a heart rate measurement, a lung function measurement, or a measurement of difficulty speaking or breathing. The asthma exacerbation measurement may include a peak flow test, a breath nitric oxide measurement, or a blood oxygen level test.

[0241] In some embodiments, the composition reduces the asthma exacerbation measurement relative to the baseline asthma exacerbation measurement. In some embodiments, the reduction is measured in a second sample obtained from the subject after administering the composition to the subject. In some embodiments, the reduction is measured directly in the subject after administering the composition to the subject. In some embodiments, the asthma exacerbation measurement is decreased by about 2.5% or more, about 5% or more, or about 7.5% or more, relative to the baseline asthma exacerbation measurement. In some embodiments, the asthma exacerbation measurement is decreased by about 10% or more, relative to the baseline asthma exacerbation measurement. In some embodiments, the asthma exacerbation measurement is decreased by about 20% or more, about 30% or more, about 40% or more, about 50% or more, about 60% or more, about 70% or more, about 80% or more, about 90% or more, relative to the baseline asthma exacerbation measurement. In some embodiments, the asthma exacerbation measurement is decreased by no more than about 2.5%, no more than about 5%, or no more than about 7.5%, relative to the baseline asthma exacerbation measurement. In some embodiments, the asthma exacerbation measurement is decreased by no more than about 10%, relative to the baseline asthma exacerbation measurement. In some embodiments, the asthma exacerbation measurement is decreased by no more than about 20%, no more than about 30%, no more than about 40%, no more than about 50%, no more than about 60%, no more than about 70%, no more than about 80%, no more than about 90%, or no more than about 100% relative to the baseline asthma exacerbation measurement. In some embodiments, the asthma exacerbation measurement is decreased by 2.5%, 5%, 7.5%, 10%, 20%, 30%, 40%, 50%, 60%, 70%, 80%, 90%, or 100%, or by a range defined by any of the two aforementioned percentages.

[0242] In some embodiments, the measurement is an MSP measurement. In some embodiments, the MSP measurement comprises an MSP level. In some embodiments, the MSP level is indicated as amass or percentage of MSP per sample weight. In some embodiments, the MSP level is indicated as a mass or percentage of MSP per sample volume. In some embodiments, the MSP level is indicated as a mass or percentage of MSP per total protein within the sample. In some embodiments, the MSP measurement is a circulating MSP measurement. In some embodiments, the MSP measurement is obtained by an assay such as an immunoassay, a colorimetric assay, or a fluorescence assay.

[0243] In some embodiments, the composition reduces the MSP measurement relative to the baseline MSP measurement. In some embodiments, the composition reduces circulating MSP levels relative to the baseline MSP measurement. In some embodiments, the composition reduces tissue MSP levels relative to the baseline MSP measurement. In some embodiments, the reduced MSP levels are measured in a second sample obtained from the subject after administering the composition to the subject. In some embodiments, the second sample is a blood, serum, plasma, liver, or lung sample. In some embodiments, the MSP measurement is decreased by about 2.5% or more, about 5% or more, or about 7.5% or more, relative to the baseline MSP measurement. In some embodiments, the MSP measurement is decreased by about 10% or more, relative to the baseline MSP measurement. In some embodiments, the MSP measurement is decreased by about 20% or more, about 30% or more, about 40% or more, about 50% or more, about 60% or more, about 70% or more, about 80% or more, about 90% or more, or about 100%, relative to the baseline MSP measurement. In some embodiments, the MSP measurement is decreased by no more than about 2.5%, no more than about 5%, or no more than about 7.5%, relative to the baseline MSP measurement. In some embodiments, the MSP measurement is decreased by no more than about 10%, relative to the baseline MSP measurement. In some embodiments, the MSP measurement is decreased by no more than about 20%, no more than about 30%, no more than about 40%, no more than about 50%, no more than about 60%, no more than about 70%, no more than about 80%, no more than about 90%, or no more than about 100% relative to the baseline MSP measurement. In some embodiments, the MSP measurement is decreased by 2.5%, 5%, 7.5%, 19%, 20%, 30%, 40%, 50%, 60%, 70%, 80%, 90%, or 100%, or by a range defined by any of the two aforementioned percentages.

[0244] In some embodiments, the measurement is an MST1 mRNA measurement. In some embodiments, the MST1 mRNA measurement comprises an MST1 mRNA level. In some embodiments, the MST1 mRNA level is indicated as an amount or percentage of MST1 mRNA per sample weight. In some embodiments, the MST1 mRNA level is indicated as an amount or percentage of MST1 mRNA per sample volume. In some embodiments, the MST1 mRNA level is indicated as an amount or percentage of MST1 mRNA per total mRNA within the sample. In some embodiments, the MST1 mRNA level is indicated as an amount or percentage of MST1 mRNA per total nucleic acids within the sample. In some embodiments, the MST1 mRNA level is indicated relative to another mRNA level, such as an mRNA level of a housekeeping gene, within the sample. In some embodiments, the MST1 mRNA measurement is obtained by an assay such as a PCR assay. In some embodiments, the PCR comprises qPCR. In some embodiments, the PCR comprises reverse transcription of the MST1 mRNA.

[0245] In some embodiments, the composition reduces the MST1 mRNA measurement relative to the baseline MST1 mRNA measurement. In some embodiments, the MST1 mRNA measurement is obtained in a second sample obtained from the subject after administering the composition to the subject. In some embodiments, the composition reduces MST1 mRNA levels relative to the baseline MST1 mRNA levels. In some embodiments, the reduced MST1 mRNA levels are measured in a second sample obtained from the subject after administering the composition to the subject. In some embodiments, the second sample is a lung sample. In some embodiments, the second sample is a liver sample. In some embodiments, the MST1 mRNA measurement is reduced by about 2.5% or more, about 5% or more, or about 7.5% or more, relative to the baseline MST1 mRNA measurement. In some embodiments, the MST1 mRNA measurement is decreased by about 10% or more, relative to the baseline MST1 mRNA measurement. In some embodiments, the MST1 mRNA measurement is decreased by about 20% or more, about 30% or more, about 40% or more, about 50% or more, about 60% or more, about 70% or more, about 80% or more, about 90% or more, or about 100%, relative to the baseline MST1 mRNA measurement. In some embodiments, the MST1 mRNA measurement is decreased by no more than about 2.5%, no more than about 5%, or no more than about 7.5%, relative to the baseline MST1 mRNA measurement. In some embodiments, the MST1 mRNA measurement is decreased by no more than about 10%, relative to the baseline MST1 mRNA measurement. In some embodiments, the MST1 mRNA measurement is decreased by no more than about 20%, no more than about 30%, no more than about 40%, no more than about 50%, no more than about 60%, no more than about 70%, no more than about 80%, no more than about 90%, or no more than about 100%, relative to the baseline MST1 mRNA measurement. In some embodiments, the MST1 mRNA measurement is decreased by 2.5%, 5%, 7.5%, 10%, 20%, 30%, 40%, 50%, 60%, 70%, 80%, 90%, or 100% or by a range defined by any of the two aforementioned percentages.

### III. Definitions

[0246] Unless defined otherwise, all terms of art, notations and other technical and scientific terms or terminology used herein are intended to have the same meaning as is commonly understood by one of ordinary skill in the art to which the claimed subject matter pertains. In some cases, terms with commonly understood meanings are defined herein for clarity and/or for ready reference, and the inclusion of such definitions herein should not necessarily be construed to represent a substantial difference over what is generally understood in the art.

[0247] Throughout this application, various embodiments may be presented in a range format. It should be understood that the description in range format is merely for convenience and brevity and should not be construed as an inflexible limitation on the scope of the disclosure. Accordingly, the description of a range should be considered to have specifically disclosed all the possible subranges as well as individual numerical values within that range. For example, description of a range such as from 1 to 6 should be considered to have specifically disclosed subranges such as from 1 to 3, from 1 to 4, from 1 to 5, from 2 to 4, from 2 to 6, from 3 to 6 etc., as well as individual numbers within that range, for example, 1, 2, 3, 4, 5, and 6. This applies regardless of the breadth of the range.

[0248] As used in the specification and claims, the singular forms “a”, “an” and “the” include plural references unless the context clearly dictates otherwise. For example, the term “a sample” includes a plurality of samples, including mixtures thereof.

[0249] The terms “determining,” “measuring,” “evaluating,” “assessing,” “assaying,” and “analyzing” are often used interchangeably herein to refer to forms of measurement. The terms include determining if an element is present or not (for example, detection). These terms can include quantitative, qualitative or quantitative and qualitative determinations. Assessing can be relative or absolute. “Detecting the presence of” can include determining the amount of something present in addition to determining whether it is present or absent depending on the context.

[0250] The terms “subject,” and “patient” may be used interchangeably herein. A “subject” can be a biological entity containing expressed genetic materials. The biological entity can be a plant, animal, or microorganism, including, for example, bacteria, viruses, fungi, and protozoa. The subject can be a mammal. The mammal can be a human. The subject may be diagnosed or suspected of being at high risk for a disease. In some cases, the subject is not necessarily diagnosed or suspected of being at high risk for the disease.

[0251] As used herein, the term “about” a number refers to that number plus or minus 10% of that number. The term “about” a range refers to that range minus 10% of its lowest value and plus 10% of its greatest value.

[0252] As used herein, the terms “treatment” or “treating” are used in reference to a pharmaceutical or other intervention regimen for obtaining beneficial or desired results in the recipient. Beneficial or desired results include but are not limited to a therapeutic benefit and/or a prophylactic benefit. A therapeutic benefit may refer to eradication or amelioration of symptoms or of an underlying disorder being treated. Also, a therapeutic benefit can be achieved with the eradication or amelioration of one or more of the physiological symptoms associated with the underlying disorder such that an improvement is observed in the subject, notwithstanding that the subject may still be afflicted with the underlying disorder. A prophylactic effect includes delaying, preventing, or eliminating the appearance of a disease or condition, delaying or eliminating the onset of symptoms of a disease or condition, slowing, halting, or reversing the progression of a disease or condition, or any combination thereof. For prophylactic benefit, a subject at risk of developing a particular disease, or to a subject reporting one or more of the physiological symptoms of a disease may undergo treatment, even though a diagnosis of this disease may not have been made.

[0253] Some embodiments refer to nucleic acid sequence information. It is contemplated that in some embodiments, thymine (T) may be interchanged with uracil (U), or vice versa. For example, some sequences in the sequence listing may recite Ts, but these may be replaced with Us in some embodiments. In some oligonucleotides with nucleic acid sequences that include uracil, the uracil may be replaced with thymine. Similarly, in some oligonucleotides with nucleic acid sequences that include thymine, the thymine may be replaced with uracil. In some embodiments, an oligonucleotide such as an siRNA comprises or consists of RNA. In some embodiments, the oligonucleotide may comprise or consist of DNA. For example, an ASO may include DNA.

[0254] The section headings used herein are for organizational purposes only and are not to be construed as limiting the subject matter described.

### VI. Examples

### Example 1: Variants in MST1 Demonstrate Protective Associations for Obstructive Lung Diseases and Related Traits

[0255] Variants in MST1 were evaluated for associations with lung diseases and related pulmonary and leukocyte traits in approximately 382,000 individuals with genotype data from the UK Biobank cohort. Variants evaluated included: (1) rs142690032, a low-frequency (AAF=0.02) MST1 stop-gained variant (Arg651Ter; R651Ter) which prematurely terminates the MST1 protein at amino acid 651, (2) rs3197999, a common (AAF=0.29) MST1 missense variant (Arg703Cys; R703C) which has been experimentally characterized as a MST1 hypomorph variant and is also a MST1↓pQTL, and (3) rs3020779, a common (AAF=0.82) MST1 synonymous variant (Pro153Pro; P153P) which is a liver and lung MST1 sQTL and a lung↓eQTL for MST1R, the gene encoding MSP's receptor. All three variants were considered hypomorphic or loss-of-function variants that resulted in a decrease in the abundance or activity of the MST1 gene product.

[0256] Analyses used a logistic or linear regression model with age, sex and the first ten principal components of genetic ancestry as covariates. The analyses resulted in identification of associations for the individual MST1 variants (Table 2A, 2B, 2C, and 2D). For example, there were protective associations with multiple lung-disease-related traits. The evaluated variants were associated with protection from COPD, asthma and lower risk of inhaled beta agonist prescription (Table 2A and 2B). Additionally, the evaluated variants were associated with increased lung function (FEV1 and FVC) and decreased circulating neutrophil counts (Table 2C and 2D).

TABLE 2A
MST1 lung disease associations

| | | | | COPD | |
|---|---|---|---|---|---|
| | | | | (n = 22,308) | |
| Variant | Gene | Function | AAF | P value | OR |
| rs142690032 | MST1 | Stop-Gained; | 0.02 | 4.07E−07 | ↓0.859 |
| | | R651Ter | | | |
| rs3197999 | MST1 | Missense; R703C; | 0.29 | 2.16E−05 | ↓0.962 |
| | | MST1 pQTL | | | |
| rs3020779 | MST1 | Synonymous; P153P; | 0.82 | 4.33E−09 | ↓0.941 |
| | | MST1 sQTL; MST1R | | | |
| | | eQTL | | | |

TABLE 2B
MST1 lung disease associations

| | Asthma | | Family History of | | Inhaled Beta Agonist | |
|---|---|---|---|---|---|---|
| | (n = 58,257) | | COPD (n = 60,301) | | Medication (n = 31,028) | |
| Variant | P value | OR | P value | OR | P value | OR |
| rs142690032 | 0.004 | ↓0.955 | 0.105 | ↓0.980 | 4.47E−04 | ↓0.931 |
| rs3197999 | 0.002 | ↓0.983 | 0.001 | ↓0.984 | 2.56E−06 | ↓0.968 |
| rs3020779 | 4.57E−04 | ↓0.979 | 0.004 | ↓0.985 | 5.32E−05 | ↓0.969 |

TABLE 2C
MST1 lung function and neutrophil associations

| | | | | FEV1 | |
|---|---|---|---|---|---|
| | | | | (n = 287,050) | |
| Variant | Gene | Function | AAF | P value | Beta |
| rs142690032 | MST1 | Stop-Gained; | 0.02 | 0.003 | ↑0.015 |
| | | R651Ter | | | |
| rs3197999 | MST1 | Missense; R703C; | 0.29 | 3.29E−15 | ↑0.002 |
| | | MST1 pQTL | | | |
| rs3020779 | MST1 | Synonymous; P153P; | 0.82 | 3.06E−10 | ↑0.002 |
| | | MST1 sQTL; MST1R | | | |
| | | eQTL | | | |

TABLE 2D
MST1 lung function and neutrophil associations

| | FVC | | FEV1/FVC Ratio | | Neutrophil Count | |
|---|---|---|---|---|---|---|
| | (n = 286,925) | | (n = 286,523) | | (n = 366,089) | |
| Variant | P value | Beta | P value | Beta | P value | Beta |
| rs142690032 | 0.002 | ↑0.003 | 0.789 | ↑−0.003 | 0.005 | ↓−0.034 |
| rs3197999 | 1.03E−11 | ↑0.002 | 0.004 | ↑0.008 | 8.2E−08 | ↓−0.018 |
| rs3020779 | 2.41E−06 | ↑0.001 | 9.32E−09 | ↑0.019 | 0.01 | ↓−0.010 |

[0257] These results indicate that loss-of-function of MST1 results in protection from COPD and asthma, improved lung function and lower circulating neutrophils, which are an important pro-inflammatory cell type in obstructive airways disease. These results further indicate that therapeutic inhibition of MST1 may result in similar disease-protective effects.

### Protective Variants in MST1 Result in Loss of MST1 Protein

[0258] Pre-mRNA expression constructs encoding for wild type and R651Ter (Arg651Ter; rs142690032) proteins were generated. The pre-mRNA of the protein coding transcript (ENST00000449682) of MST1, containing the exons, introns, and 5′ and 3′ UTRs, was cloned into a pcDNA3.1(+) vector driven by a CMV promoter. Empty vector was used as control. For R651Ter expression constructs, the A allele replaced the G allele at DNA sequence position chr3:49684379 (human genome build 38). This created an R651Ter premature stop codon.

[0259] Transfections of Huh7 cells were optimized. Huh7 cells were plated in a T75 flask in complete growth media and grown for 48 hours followed by a media change. Cells were then transfected with 15 μg of plasmid DNA and 45 μl of TransIT-2020. Cells were incubated for 48 hours, and then harvested.

[0260] Cell lysates from transfected cells were assayed to evaluate intracellular MST1 protein by western blot (FIG. 1). In empty vector transfected Huh7 cells, MST1 was not detectable by western blot. In cells transfected with the wild type construct, MST1 was detected by western blot as a band around 80 kDa. In cells transfected with the R651Ter construct, MST1 was substantially reduced by western blot compared with wild type, suggesting the premature stop codon results in loss of MST1 via nonsense mediated decay or degradation at the protein level.

[0261] These data provide experimental verification that MST1 gene variants associated with protection from COPD and asthma, improved lung function and lower circulating neutrophils, result in loss of MST1 protein abundance or function. Accordingly, in some cases therapeutic inhibition or modulation of MST1 may be an effective genetically-informed method of treatment for these diseases and measures.

### Example 2: Bioinformatic Selection of Sequences in Order to Identify Therapeutic siRNAs to Downmodulate Expression of the MST1 mRNA

[0262] Screening sets were defined based on bioinformatic analysis. Therapeutic siRNAs were designed to target human MST1, and the MST1 sequence of at least one toxicology-relevant species, in this case, the non-human primates (NHP) rhesus and cynomolgus monkeys. Drivers for the design of the screening set were predicted specificity of the siRNAs against the transcriptome of the relevant species as well as cross-reactivity between species. Predicted specificity in human, rhesus monkey, cynomolgus monkey, mouse and rat was determined for sense (S) and antisense (AS) strands. These were assigned a “specificity score” which considered a likelihood of unintended downregulation of any other transcript by full or partial complementarity of an siRNA strand (up to 4 mismatches within positions 2-18) as well as the number and positions of mismatches. Thus, off-target(s) for antisense and sense strands of each siRNA were identified. In addition, the number of potential off-targets was used as an additional specificity factor in the specificity score. As identified, siRNAs with high specificity and a low number of predicted off-targets provide a benefit of increased targeting specificity.

[0263] In addition to selecting siRNA sequences with high sequence specificity to MST1 mRNA, siRNA sequences within the seed region were analyzed for similarity to seed regions of known miRNAs. siRNAs can function in a miRNA like manner via base-pairing with complementary sequences within the 3′-UTR of mRNA molecules. The complementarity typically encompasses the 5′-bases at positions 2-7 of the miRNA (seed region). To circumvent siRNAs to act via functional miRNA binding sites, siRNA strands containing natural miRNA seed regions were avoided. Seed regions identified in miRNAs from human, mouse, rat, rhesus monkey, dog, rabbit and pig are referred to as “conserved”. Combining the “specificity score” with miRNA seed analysis yielded a “specificity category”. This is divided into categories 1-4, with 1 having the highest specificity and 4 having the lowest specificity. Each strand of the siRNA is assigned to a specificity category.

[0264] Specificity and species cross-reactivity was assessed for human, cynomolgus monkey, rhesus monkey, mouse and rat MST1. The analysis was based on a canonical siRNA design using 19 bases and 17 bases (without considering positions 1 and 19) for cross-reactivity. Full match as well as single mismatch analyses were included.

[0265] Analysis of the human Single Nucleotide Polymorphism (SNP) database (NCBI-DB-SNP) to identify siRNAs targeting regions with known SNPs was also carried out to identify siRNAs that may be non-functional in individuals containing the SNP. Information regarding the positions of SNPs within the target sequence as well as minor allele frequency (MAF) in case data was obtained in this analysis.

[0266] Initial analysis of relevant MST1 mRNA sequence revealed few sequences that fulfil the specificity parameters and at the same time target MST1 mRNA in all of the analyzed relevant species. Therefore, it was decided to design independent screening subsets for the therapeutic siRNAs.

[0267] The siRNAs in these subsets recognize the human, cynomolgus monkey, rhesus monkey MST1 sequences. Therefore, the siRNAs in these subsets can be used to target human MST1 in a therapeutic setting.

[0268] The number of siRNA sequences that can be derived from human MST1 mRNA (NM_020998.4 SEQ ID NO: 6185) without consideration of specificity or species cross-reactivity was 3024 (sense and antisense strand sequences included in SEQ ID NOS: 1-6048).

[0269] Prioritizing sequences for target specificity, species cross-reactivity, miRNA seed region sequences and SNPs as described above yields subset A. Subset A contains 231 siRNAs whose base sequences are shown in Table 3.

TABLE 3
Sequences in siRNA subset A

| SEQ | sense strand | SEQ | antisense strand |
|---|---|---|---|
| ID | sequence | ID | sequence |
| NO: | (5′-3′) | NO: | (5′-3′) |
| 424 | AGCUGGGGCAAGUAAUUUU | 3448 | AAAAUUACUUGCCCCAGCU |
| 474 | AAAAGUUUAAUGUCACCCA | 3498 | UGGGUGACAUUAAACUUUU |
| 480 | UUAAUGUCACCCAGGGGCU | 3504 | AGCCCCUGGGUGACAUUAA |
| 481 | UAAUGUCACCCAGGGGCUG | 3505 | CAGCCCCUGGGUGACAUUA |
| 587 | UCAAGUGUCCCCACCAAAC | 3611 | GUUUGGUGGGGACACUUGA |
| 596 | CCCACCAAACCUUCCUAAC | 3620 | GUUAGGAAGGUUUGGUGGG |
| 597 | CCACCAAACCUUCCUAACA | 3621 | UGUUAGGAAGGUUUGGUGG |
| 598 | CACCAAACCUUCCUAACAC | 3622 | GUGUUAGGAAGGUUUGGUG |
| 603 | AACCUUCCUAACACCUGUC | 3627 | GACAGGUGUUAGGAAGGUU |
| 608 | UCCUAACACCUGUCCACUA | 3632 | UAGUGGACAGGUGUUAGGA |
| 638 | GCCCUUGCAACUGACCUAU | 3662 | AUAGGUCAGUUGCAAGGGC |
| 639 | CCCUUGCAACUGACCUAUG | 3663 | CAUAGGUCAGUUGCAAGGG |
| 642 | UUGCAACUGACCUAUGGGA | 3666 | UCCCAUAGGUCAGUUGCAA |
| 643 | UGCAACUGACCUAUGGGAC | 3667 | GUCCCAUAGGUCAGUUGCA |
| 644 | GCAACUGACCUAUGGGACC | 3668 | GGUCCCAUAGGUCAGUUGC |
| 646 | AACUGACCUAUGGGACCUG | 3670 | CAGGUCCCAUAGGUCAGUU |
| 647 | ACUGACCUAUGGGACCUGA | 3671 | UCAGGUCCCAUAGGUCAGU |
| 741 | AGAGCCACCCAAUCCCGUA | 3765 | UACGGGAUUGGGUGGCUCU |
| 742 | GAGCCACCCAAUCCCGUAG | 3766 | CUACGGGAUUGGGUGGCUC |
| 743 | AGCCACCCAAUCCCGUAGG | 3767 | CCUACGGGAUUGGGUGGCU |
| 745 | CCACCCAAUCCCGUAGGGA | 3769 | UCCCUACGGGAUUGGGUGG |
| 746 | CACCCAAUCCCGUAGGGAC | 3770 | GUCCCUACGGGAUUGGGUG |
| 747 | ACCCAAUCCCGUAGGGACA | 3771 | UGUCCCUACGGGAUUGGGU |
| 748 | CCCAAUCCCGUAGGGACAG | 3772 | CUGUCCCUACGGGAUUGGG |
| 749 | CCAAUCCCGUAGGGACAGG | 3773 | CCUGUCCCUACGGGAUUGG |
| 750 | CAAUCCCGUAGGGACAGGU | 3774 | ACCUGUCCCUACGGGAUUG |
| 751 | AAUCCCGUAGGGACAGGUU | 3775 | AACCUGUCCCUACGGGAUU |
| 753 | UCCCGUAGGGACAGGUUUC | 3777 | GAAACCUGUCCCUACGGGA |
| 792 | GUGGUGGGUCACAGUGCAG | 3816 | CUGCACUGUGACCCACCAC |
| 859 | CAAUGCUUAGGGGUCCCUG | 3883 | CAGGGACCCCUAAGCAUUG |
| 1041 | CGUGAGCAGCCAUGGUUGC | 4065 | GCAACCAUGGCUGCUCACG |
| 1042 | GUGAGCAGCCAUGGUUGCC | 4066 | GGCAACCAUGGCUGCUCAC |
| 1048 | AGCCAUGGUUGCCAACUGC | 4072 | GCAGUUGGCAACCAUGGCU |
| 1050 | CCAUGGUUGCCAACUGCUG | 4074 | CAGCAGUUGGCAACCAUGG |
| 1068 | GCCAUGGACUCAACACUCG | 4092 | CGAGUGUUGAGUCCAUGGC |
| 1070 | CAUGGACUCAACACUCGCC | 4094 | GGCGAGUGUUGAGUCCAUG |
| 1071 | AUGGACUCAACACUCGCCC | 4095 | GGGCGAGUGUUGAGUCCAU |
| 1072 | UGGACUCAACACUCGCCCC | 4096 | GGGGCGAGUGUUGAGUCCA |
| 1073 | GGACUCAACACUCGCCCCA | 4097 | UGGGGCGAGUGUUGAGUCC |
| 1074 | GACUCAACACUCGCCCCAC | 4098 | GUGGGGCGAGUGUUGAGUC |
| 1077 | UCAACACUCGCCCCACACG | 4101 | CGUGUGGGGCGAGUGUUGA |
| 1079 | AACACUCGCCCCACACGAG | 4103 | CUCGUGUGGGGCGAGUGUU |
| 1081 | CACUCGCCCCACACGAGGC | 4105 | GCCUCGUGUGGGGCGAGUG |
| 1082 | ACUCGCCCCACACGAGGCU | 4106 | AGCCUCGUGUGGGGCGAGU |
| 1083 | CUCGCCCCACACGAGGCUG | 4107 | CAGCCUCGUGUGGGGCGAG |
| 1086 | GCCCCACACGAGGCUGCGG | 4110 | CCGCAGCCUCGUGUGGGGC |
| 1087 | CCCCACACGAGGCUGCGGC | 4111 | GCCGCAGCCUCGUGUGGGG |
| 1110 | UGGGCGCUGUGACCUCUUC | 4134 | GAAGAGGUCACAGCGCCCA |
| 1162 | AACAAUGGGGUUGGGUACC | 4186 | GGUACCCAACCCCAUUGUU |
| 1163 | ACAAUGGGGUUGGGUACCG | 4187 | CGGUACCCAACCCCAUUGU |
| 1164 | CAAUGGGGUUGGGUACCGG | 4188 | CCGGUACCCAACCCCAUUG |
| 1170 | GGUUGGGUACCGGGGCACC | 4194 | GGUGCCCCGGUACCCAACC |
| 1220 | AGGCUUGGAGCCACAAGUU | 4244 | AACUUGUGGCUCCAAGCCU |
| 1221 | GGCUUGGAGCCACAAGUUC | 4245 | GAACUUGUGGCUCCAAGCC |
| 1266 | UCUCCGGAAUGGCCUGGAA | 4290 | UUCCAGGCCAUUCCGGAGA |
| 1298 | GUAACCCUGAUGGCGACCC | 4322 | GGGUCGCCAUCAGGGUUAC |
| 1309 | GGCGACCCCGGAGGUCCUU | 4333 | AAGGACCUCCGGGGUCGCC |
| 1311 | CGACCCCGGAGGUCCUUGG | 4335 | CCAAGGACCUCCGGGGUCG |
| 1312 | GACCCCGGAGGUCCUUGGU | 4336 | ACCAAGGACCUCCGGGGUC |
| 1313 | ACCCCGGAGGUCCUUGGUG | 4337 | CACCAAGGACCUCCGGGGU |
| 1314 | CCCCGGAGGUCCUUGGUGC | 4338 | GCACCAAGGACCUCCGGGG |
| 1353 | GCGCUUCCAGAGCUGCGGC | 4377 | GCCGCAGCUCUGGAAGCGC |
| 1364 | GCUGCGGCAUCAAAUCCUG | 4388 | CAGGAUUUGAUGCCGCAGC |
| 1365 | CUGCGGCAUCAAAUCCUGC | 4389 | GCAGGAUUUGAUGCCGCAG |
| 1366 | UGCGGCAUCAAAUCCUGCC | 4390 | GGCAGGAUUUGAUGCCGCA |
| 1367 | GCGGCAUCAAAUCCUGCCG | 4391 | CGGCAGGAUUUGAUGCCGC |
| 1368 | CGGCAUCAAAUCCUGCCGG | 4392 | CCGGCAGGAUUUGAUGCCG |
| 1369 | GGCAUCAAAUCCUGCCGGG | 4393 | CCCGGCAGGAUUUGAUGCC |
| 1370 | GCAUCAAAUCCUGCCGGGA | 4394 | UCCCGGCAGGAUUUGAUGC |
| 1371 | CAUCAAAUCCUGCCGGGAG | 4395 | CUCCCGGCAGGAUUUGAUG |
| 1373 | UCAAAUCCUGCCGGGAGGC | 4397 | GCCUCCCGGCAGGAUUUGA |
| 1375 | AAAUCCUGCCGGGAGGCCG | 4399 | CGGCCUCCCGGCAGGAUUU |
| 1376 | AAUCCUGCCGGGAGGCCGC | 4400 | GCGGCCUCCCGGCAGGAUU |
| 1381 | UGCCGGGAGGCCGCGUGUG | 4405 | CACACGCGGCCUCCCGGCA |
| 1440 | CACGGAGUCAGGGCGCGAG | 4464 | CUCGCGCCCUGACUCCGUG |
| 1454 | GCGAGUGCCAGCGCUGGGA | 4478 | UCCCAGCGCUGGCACUCGC |
| 1490 | AGCACCCCUUCGAGCCGGG | 4514 | CCCGGCUCGAAGGGGUGCU |
| 1530 | GGACGACAACUAUUGCCGG | 4554 | CCGGCAAUAGUUGUCGUCC |
| 1531 | GACGACAACUAUUGCCGGA | 4555 | UCCGGCAAUAGUUGUCGUC |
| 1532 | ACGACAACUAUUGCCGGAA | 4556 | UUCCGGCAAUAGUUGUCGU |
| 1533 | CGACAACUAUUGCCGGAAU | 4557 | AUUCCGGCAAUAGUUGUCG |
| 1534 | GACAACUAUUGCCGGAAUC | 4558 | GAUUCCGGCAAUAGUUGUC |
| 1538 | ACUAUUGCCGGAAUCCUGA | 4562 | UCAGGAUUCCGGCAAUAGU |
| 1543 | UGCCGGAAUCCUGACGGCU | 4567 | AGCCGUCAGGAUUCCGGCA |
| 1544 | GCCGGAAUCCUGACGGCUC | 4568 | GAGCCGUCAGGAUUCCGGC |
| 1545 | CCGGAAUCCUGACGGCUCC | 4569 | GGAGCCGUCAGGAUUCCGG |
| 1577 | GCUACACUACGGAUCCGCA | 4601 | UGCGGAUCCGUAGUGUAGC |
| 1578 | CUACACUACGGAUCCGCAG | 4602 | CUGCGGAUCCGUAGUGUAG |
| 1579 | UACACUACGGAUCCGCAGA | 4603 | UCUGCGGAUCCGUAGUGUA |
| 1597 | AUCGAGCGAGAGUUCUGUG | 4621 | CACAGAACUCUCGCUCGAU |
| 1598 | UCGAGCGAGAGUUCUGUGA | 4622 | UCACAGAACUCUCGCUCGA |
| 1600 | GAGCGAGAGUUCUGUGACC | 4624 | GGUCACAGAACUCUCGCUC |
| 1601 | AGCGAGAGUUCUGUGACCU | 4625 | AGGUCACAGAACUCUCGCU |
| 1946 | CAGGGGAGCAGUACCGCGG | 4970 | CCGCGGUACUGCUCCCCUG |
| 1947 | AGGGGAGCAGUACCGCGGC | 4971 | GCCGCGGUACUGCUCCCCU |
| 1948 | GGGGAGCAGUACCGCGGCA | 4972 | UGCCGCGGUACUGCUCCCC |
| 1950 | GGAGCAGUACCGCGGCACG | 4974 | CGUGCCGCGGUACUGCUCC |
| 1951 | GAGCAGUACCGCGGCACGG | 4975 | CCGUGCCGCGGUACUGCUC |
| 1953 | GCAGUACCGCGGCACGGUC | 4977 | GACCGUGCCGCGGUACUGC |
| 1954 | CAGUACCGCGGCACGGUCA | 4978 | UGACCGUGCCGCGGUACUG |
| 1955 | AGUACCGCGGCACGGUCAG | 4979 | CUGACCGUGCCGCGGUACU |
| 1956 | GUACCGCGGCACGGUCAGC | 4980 | GCUGACCGUGCCGCGGUAC |
| 1957 | UACCGCGGCACGGUCAGCA | 4981 | UGCUGACCGUGCCGCGGUA |
| 1959 | CCGCGGCACGGUCAGCAAG | 4983 | CUUGCUGACCGUGCCGCGG |
| 1960 | CGCGGCACGGUCAGCAAGA | 4984 | UCUUGCUGACCGUGCCGCG |
| 1961 | GCGGCACGGUCAGCAAGAC | 4985 | GUCUUGCUGACCGUGCCGC |
| 1963 | GGCACGGUCAGCAAGACCC | 4987 | GGGUCUUGCUGACCGUGCC |
| 1965 | CACGGUCAGCAAGACCCGC | 4989 | GCGGGUCUUGCUGACCGUG |
| 1968 | GGUCAGCAAGACCCGCAAG | 4992 | CUUGCGGGUCUUGCUGACC |
| 1971 | CAGCAAGACCCGCAAGGGU | 4995 | ACCCUUGCGGGUCUUGCUG |
| 1972 | AGCAAGACCCGCAAGGGUG | 4996 | CACCCUUGCGGGUCUUGCU |
| 1974 | CAAGACCCGCAAGGGUGUC | 4998 | GACACCCUUGCGGGUCUUG |
| 1975 | AAGACCCGCAAGGGUGUCC | 4999 | GGACACCCUUGCGGGUCUU |
| 1976 | AGACCCGCAAGGGUGUCCA | 5000 | UGGACACCCUUGCGGGUCU |
| 1977 | GACCCGCAAGGGUGUCCAG | 5001 | CUGGACACCCUUGCGGGUC |
| 1979 | CCCGCAAGGGUGUCCAGUG | 5003 | CACUGGACACCCUUGCGGG |
| 1980 | CCGCAAGGGUGUCCAGUGC | 5004 | GCACUGGACACCCUUGCGG |
| 1995 | GUGCCAGCGCUGGUCCGCU | 5019 | AGCGGACCAGCGCUGGCAC |
| 1997 | GCCAGCGCUGGUCCGCUGA | 5021 | UCAGCGGACCAGCGCUGGC |
| 1998 | CCAGCGCUGGUCCGCUGAG | 5022 | CUCAGCGGACCAGCGCUGG |
| 2000 | AGCGCUGGUCCGCUGAGAC | 5024 | GUCUCAGCGGACCAGCGCU |
| 2001 | GCGCUGGUCCGCUGAGACG | 5025 | CGUCUCAGCGGACCAGCGC |
| 2019 | GCCGCACAAGCCGCAGUUC | 5043 | GAACUGCGGCUUGUGCGGC |
| 2020 | CCGCACAAGCCGCAGUUCA | 5044 | UGAACUGCGGCUUGUGCGG |
| 2022 | GCACAAGCCGCAGUUCACG | 5046 | CGUGAACUGCGGCUUGUGC |
| 2023 | CACAAGCCGCAGUUCACGU | 5047 | ACGUGAACUGCGGCUUGUG |
| 2024 | ACAAGCCGCAGUUCACGUU | 5048 | AACGUGAACUGCGGCUUGU |
| 2025 | CAAGCCGCAGUUCACGUUU | 5049 | AAACGUGAACUGCGGCUUG |
| 2026 | AAGCCGCAGUUCACGUUUA | 5050 | UAAACGUGAACUGCGGCUU |
| 2027 | AGCCGCAGUUCACGUUUAC | 5051 | GUAAACGUGAACUGCGGCU |
| 2029 | CCGCAGUUCACGUUUACCU | 5053 | AGGUAAACGUGAACUGCGG |
| 2068 | GAGGAGAACUUCUGCCGGA | 5092 | UCCGGCAGAAGUUCUCCUC |
| 2082 | CCGGAACCCAGAUGGGGAU | 5106 | AUCCCCAUCUGGGUUCCGG |
| 2083 | CGGAACCCAGAUGGGGAUA | 5107 | UAUCCCCAUCUGGGUUCCG |
| 2084 | GGAACCCAGAUGGGGAUAG | 5108 | CUAUCCCCAUCUGGGUUCC |
| 2086 | AACCCAGAUGGGGAUAGCC | 5110 | GGCUAUCCCCAUCUGGGUU |
| 2087 | ACCCAGAUGGGGAUAGCCA | 5111 | UGGCUAUCCCCAUCUGGGU |
| 2090 | CAGAUGGGGAUAGCCAUGG | 5114 | CCAUGGCUAUCCCCAUCUG |
| 2091 | AGAUGGGGAUAGCCAUGGG | 5115 | CCCAUGGCUAUCCCCAUCU |
| 2094 | UGGGGAUAGCCAUGGGCCC | 5118 | GGGCCCAUGGCUAUCCCCA |
| 2099 | AUAGCCAUGGGCCCUGGUG | 5123 | CACCAGGGCCCAUGGCUAU |
| 2115 | GUGCUACACGAUGGACCCA | 5139 | UGGGUCCAUCGUGUAGCAC |
| 2139 | CCCAUUCGACUACUGUGCC | 5163 | GGCACAGUAGUCGAAUGGG |
| 2140 | CCAUUCGACUACUGUGCCC | 5164 | GGGCACAGUAGUCGAAUGG |
| 2141 | CAUUCGACUACUGUGCCCU | 5165 | AGGGCACAGUAGUCGAAUG |
| 2142 | AUUCGACUACUGUGCCCUG | 5166 | CAGGGCACAGUAGUCGAAU |
| 2145 | CGACUACUGUGCCCUGCGA | 5169 | UCGCAGGGCACAGUAGUCG |
| 2146 | GACUACUGUGCCCUGCGAC | 5170 | GUCGCAGGGCACAGUAGUC |
| 2148 | CUACUGUGCCCUGCGACGC | 5172 | GCGUCGCAGGGCACAGUAG |
| 2149 | UACUGUGCCCUGCGACGCU | 5173 | AGCGUCGCAGGGCACAGUA |
| 2151 | CUGUGCCCUGCGACGCUGC | 5175 | GCAGCGUCGCAGGGCACAG |
| 2155 | GCCCUGCGACGCUGCGCUG | 5179 | CAGCGCAGCGUCGCAGGGC |
| 2156 | CCCUGCGACGCUGCGCUGA | 5180 | UCAGCGCAGCGUCGCAGGG |
| 2157 | CCUGCGACGCUGCGCUGAU | 5181 | AUCAGCGCAGCGUCGCAGG |
| 2159 | UGCGACGCUGCGCUGAUGA | 5183 | UCAUCAGCGCAGCGUCGCA |
| 2160 | GCGACGCUGCGCUGAUGAC | 5184 | GUCAUCAGCGCAGCGUCGC |
| 2161 | CGACGCUGCGCUGAUGACC | 5185 | GGUCAUCAGCGCAGCGUCG |
| 2162 | GACGCUGCGCUGAUGACCA | 5186 | UGGUCAUCAGCGCAGCGUC |
| 2163 | ACGCUGCGCUGAUGACCAG | 5187 | CUGGUCAUCAGCGCAGCGU |
| 2167 | UGCGCUGAUGACCAGCCGC | 5191 | GCGGCUGGUCAUCAGCGCA |
| 2168 | GCGCUGAUGACCAGCCGCC | 5192 | GGCGGCUGGUCAUCAGCGC |
| 2172 | UGAUGACCAGCCGCCAUCA | 5196 | UGAUGGCGGCUGGUCAUCA |
| 2173 | GAUGACCAGCCGCCAUCAA | 5197 | UUGAUGGCGGCUGGUCAUC |
| 2175 | UGACCAGCCGCCAUCAAUC | 5199 | GAUUGAUGGCGGCUGGUCA |
| 2181 | GCCGCCAUCAAUCCUGGAC | 5205 | GUCCAGGAUUGAUGGCGGC |
| 2183 | CGCCAUCAAUCCUGGACCC | 5207 | GGGUCCAGGAUUGAUGGCG |
| 2225 | AGUGUGGCAAGAGGGUGGA | 5249 | UCCACCCUCUUGCCACACU |
| 2227 | UGUGGCAAGAGGGUGGAUC | 5251 | GAUCCACCCUCUUGCCACA |
| 2228 | GUGGCAAGAGGGUGGAUCG | 5252 | CGAUCCACCCUCUUGCCAC |
| 2288 | AUCCGGGCAACUCACCCUG | 5312 | CAGGGUGAGUUGCCCGGAU |
| 2289 | UCCGGGCAACUCACCCUGG | 5313 | CCAGGGUGAGUUGCCCGGA |
| 2307 | GACAGUCAGCUUGCGGAAU | 5331 | AUUCCGCAAGCUGACUGUC |
| 2308 | ACAGUCAGCUUGCGGAAUC | 5332 | GAUUCCGCAAGCUGACUGU |
| 2310 | AGUCAGCUUGCGGAAUCGG | 5334 | CCGAUUCCGCAAGCUGACU |
| 2369 | AGUGGAUACUGACUGCCCG | 5393 | CGGGCAGUCAGUAUCCACU |
| 2371 | UGGAUACUGACUGCCCGGC | 5395 | GCCGGGCAGUCAGUAUCCA |
| 2372 | GGAUACUGACUGCCCGGCA | 5396 | UGCCGGGCAGUCAGUAUCC |
| 2374 | AUACUGACUGCCCGGCAGU | 5398 | ACUGCCGGGCAGUCAGUAU |
| 2375 | UACUGACUGCCCGGCAGUG | 5399 | CACUGCCGGGCAGUCAGUA |
| 2378 | UGACUGCCCGGCAGUGCUU | 5402 | AAGCACUGCCGGGCAGUCA |
| 2382 | UGCCCGGCAGUGCUUCUCC | 5406 | GGAGAAGCACUGCCGGGCA |
| 2420 | CGGGCUAUGAGGUAUGGUU | 5444 | AACCAUACCUCAUAGCCCG |
| 2421 | GGGCUAUGAGGUAUGGUUG | 5445 | CAACCAUACCUCAUAGCCC |
| 2431 | GUAUGGUUGGGCACCCUGU | 5455 | ACAGGGUGCCCAACCAUAC |
| 2476 | AGCCUACAGCGGGUCCCAG | 5500 | CUGGGACCCGCUGUAGGCU |
| 2479 | CUACAGCGGGUCCCAGUAG | 5503 | CUACUGGGACCCGCUGUAG |
| 2480 | UACAGCGGGUCCCAGUAGC | 5504 | GCUACUGGGACCCGCUGUA |
| 2481 | ACAGCGGGUCCCAGUAGCC | 5505 | GGCUACUGGGACCCGCUGU |
| 2482 | CAGCGGGUCCCAGUAGCCA | 5506 | UGGCUACUGGGACCCGCUG |
| 2483 | AGCGGGUCCCAGUAGCCAA | 5507 | UUGGCUACUGGGACCCGCU |
| 2484 | GCGGGUCCCAGUAGCCAAG | 5508 | CUUGGCUACUGGGACCCGC |
| 2498 | CCAAGAUGGUGUGUGGGCC | 5522 | GGCCCACACACCAUCUUGG |
| 2499 | CAAGAUGGUGUGUGGGCCC | 5523 | GGGCCCACACACCAUCUUG |
| 2517 | CUCAGGCUCCCAGCUUGUC | 5541 | GACAAGCUGGGAGCCUGAG |
| 2527 | CAGCUUGUCCUGCUCAAGC | 5551 | GCUUGAGCAGGACAAGCUG |
| 2561 | CCCUGAACCAGCGUGUGGC | 5585 | GCCACACGCUGGUUCAGGG |
| 2562 | CCUGAACCAGCGUGUGGCC | 5586 | GGCCACACGCUGGUUCAGG |
| 2596 | CCUGAAUGGUAUGUGGUGC | 5620 | GCACCACAUACCAUUCAGG |
| 2628 | GUGUGAGAUUGCAGGCUGG | 5652 | CCAGCCUGCAAUCUCACAC |
| 2629 | UGUGAGAUUGCAGGCUGGG | 5653 | CCCAGCCUGCAAUCUCACA |
| 2645 | GGGGUGAGACCAAAGGUAC | 5669 | GUACCUUUGGUCUCACCCC |
| 2646 | GGGUGAGACCAAAGGUACG | 5670 | CGUACCUUUGGUCUCACCC |
| 2666 | GUAAUGACACAGUCCUAAA | 5690 | UUUAGGACUGUGUCAUUAC |
| 2667 | UAAUGACACAGUCCUAAAU | 5691 | AUUUAGGACUGUGUCAUUA |
| 2670 | UGACACAGUCCUAAAUGUG | 5694 | CACAUUUAGGACUGUGUCA |
| 2673 | CACAGUCCUAAAUGUGGCC | 5697 | GGCCACAUUUAGGACUGUG |
| 2675 | CAGUCCUAAAUGUGGCCUU | 5699 | AAGGCCACAUUUAGGACUG |
| 2676 | AGUCCUAAAUGUGGCCUUG | 5700 | CAAGGCCACAUUUAGGACU |
| 2707 | UCCAACCAGGAGUGUAACA | 5731 | UGUUACACUCCUGGUUGGA |
| 2709 | CAACCAGGAGUGUAACAUC | 5733 | GAUGUUACACUCCUGGUUG |
| 2710 | AACCAGGAGUGUAACAUCA | 5734 | UGAUGUUACACUCCUGGUU |
| 2712 | CCAGGAGUGUAACAUCAAG | 5736 | CUUGAUGUUACACUCCUGG |
| 2715 | GGAGUGUAACAUCAAGCAC | 5739 | GUGCUUGAUGUUACACUCC |
| 2716 | GAGUGUAACAUCAAGCACC | 5740 | GGUGCUUGAUGUUACACUC |
| 2718 | GUGUAACAUCAAGCACCGA | 5742 | UCGGUGCUUGAUGUUACAC |
| 2723 | ACAUCAAGCACCGAGGACG | 5747 | CGUCCUCGGUGCUUGAUGU |
| 2725 | AUCAAGCACCGAGGACGUG | 5749 | CACGUCCUCGGUGCUUGAU |
| 2811 | GGGCCCACUUGCCUGCUUU | 5835 | AAAGCAGGCAAGUGGGCCC |
| 2815 | CCACUUGCCUGCUUUACCC | 5839 | GGGUAAAGCAGGCAAGUGG |
| 2820 | UGCCUGCUUUACCCACAAC | 5844 | GUUGUGGGUAAAGCAGGCA |
| 2844 | GGUCCUGGAAGGAAUUAUA | 5868 | UAUAAUUCCUUCCAGGACC |
| 2857 | AUUAUAAUCCCCAACCGAG | 5881 | CUCGGUUGGGGAUUAUAAU |
| 2859 | UAUAAUCCCCAACCGAGUA | 5883 | UACUCGGUUGGGGAUUAUA |
| 2902 | GUCUUCACGCGUGUCUCUG | 5926 | CAGAGACACGCGUGAAGAC |
| 2903 | UCUUCACGCGUGUCUCUGU | 5927 | ACAGAGACACGCGUGAAGA |
| 2907 | CACGCGUGUCUCUGUGUUU | 5931 | AAACACAGAGACACGCGUG |
| 2998 | AACUUCUUGUCAGACAUAA | 6022 | UUAUGUCUGACAAGAAGUU |
| 2999 | ACUUCUUGUCAGACAUAAA | 6023 | UUUAUGUCUGACAAGAAGU |
| 3000 | CUUCUUGUCAGACAUAAAG | 6024 | CUUUAUGUCUGACAAGAAG |
| 3002 | UCUUGUCAGACAUAAAGCC | 6026 | GGCUUUAUGUCUGACAAGA |
| 3004 | UUGUCAGACAUAAAGCCAU | 6028 | AUGGCUUUAUGUCUGACAA |

[0270] The siRNAs in subset A have the following characteristics:
[0271] Cross-reactivity: With 19mer in human MST1 mRNA, with 17mer/19mer in NHP MST1
[0272] Specificity category: For human and NHP: AS2 or better, SS3 or better
[0273] miRNA seeds: AS+SS strand: seed region not conserved in human, mouse, and rat and not present in >4 species
[0274] Off-target frequency: ≤20 human off-targets matched with 2 mismatches in antisense strand
[0275] SNPs: siRNA target sites do not harbor SNPs with a MAF≥100 (pos. 2-18)

[0276] The siRNA sequences in subset A were selected for more stringent specificity to yield subset B. Subset B includes 197 siRNAs whose base sequences are shown in Table 4.

TABLE 4
Sequences in siRNA subset B

| SEQ | | SEQ | |
|---|---|---|---|
| ID | sense strand | ID | antisense strand |
| NO: | sequence (5′-3′) | NO: | sequence (5′-3′) |
| 474 | AAAAGUUUAAUGUCACCCA | 3498 | UGGGUGACAUUAAACUUUU |
| 480 | UUAAUGUCACCCAGGGGCU | 3504 | AGCCCCUGGGUGACAUUAA |
| 597 | CCACCAAACCUUCCUAACA | 3621 | UGUUAGGAAGGUUUGGUGG |
| 603 | AACCUUCCUAACACCUGUC | 3627 | GACAGGUGUUAGGAAGGUU |
| 608 | UCCUAACACCUGUCCACUA | 3632 | UAGUGGACAGGUGUUAGGA |
| 638 | GCCCUUGCAACUGACCUAU | 3662 | AUAGGUCAGUUGCAAGGGC |
| 639 | CCCUUGCAACUGACCUAUG | 3663 | CAUAGGUCAGUUGCAAGGG |
| 642 | UUGCAACUGACCUAUGGGA | 3666 | UCCCAUAGGUCAGUUGCAA |
| 643 | UGCAACUGACCUAUGGGAC | 3667 | GUCCCAUAGGUCAGUUGCA |
| 644 | GCAACUGACCUAUGGGACC | 3668 | GGUCCCAUAGGUCAGUUGC |
| 646 | AACUGACCUAUGGGACCUG | 3670 | CAGGUCCCAUAGGUCAGUU |
| 647 | ACUGACCUAUGGGACCUGA | 3671 | UCAGGUCCCAUAGGUCAGU |
| 741 | AGAGCCACCCAAUCCCGUA | 3765 | UACGGGAUUGGGUGGCUCU |
| 742 | GAGCCACCCAAUCCCGUAG | 3766 | CUACGGGAUUGGGUGGCUC |
| 743 | AGCCACCCAAUCCCGUAGG | 3767 | CCUACGGGAUUGGGUGGCU |
| 745 | CCACCCAAUCCCGUAGGGA | 3769 | UCCCUACGGGAUUGGGUGG |
| 746 | CACCCAAUCCCGUAGGGAC | 3770 | GUCCCUACGGGAUUGGGUG |
| 747 | ACCCAAUCCCGUAGGGACA | 3771 | UGUCCCUACGGGAUUGGGU |
| 748 | CCCAAUCCCGUAGGGACAG | 3772 | CUGUCCCUACGGGAUUGGG |
| 749 | CCAAUCCCGUAGGGACAGG | 3773 | CCUGUCCCUACGGGAUUGG |
| 750 | CAAUCCCGUAGGGACAGGU | 3774 | ACCUGUCCCUACGGGAUUG |
| 751 | AAUCCCGUAGGGACAGGUU | 3775 | AACCUGUCCCUACGGGAUU |
| 753 | UCCCGUAGGGACAGGUUUC | 3777 | GAAACCUGUCCCUACGGGA |
| 792 | GUGGUGGGUCACAGUGCAG | 3816 | CUGCACUGUGACCCACCAC |
| 859 | CAAUGCUUAGGGGUCCCUG | 3883 | CAGGGACCCCUAAGCAUUG |
| 1041 | CGUGAGCAGCCAUGGUUGC | 4065 | GCAACCAUGGCUGCUCACG |
| 1042 | GUGAGCAGCCAUGGUUGCC | 4066 | GGCAACCAUGGCUGCUCAC |
| 1050 | CCAUGGUUGCCAACUGCUG | 4074 | CAGCAGUUGGCAACCAUGG |
| 1070 | CAUGGACUCAACACUCGCC | 4094 | GGCGAGUGUUGAGUCCAUG |
| 1071 | AUGGACUCAACACUCGCCC | 4095 | GGGCGAGUGUUGAGUCCAU |
| 1072 | UGGACUCAACACUCGCCCC | 4096 | GGGGCGAGUGUUGAGUCCA |
| 1073 | GGACUCAACACUCGCCCCA | 4097 | UGGGGCGAGUGUUGAGUCC |
| 1074 | GACUCAACACUCGCCCCAC | 4098 | GUGGGGCGAGUGUUGAGUC |
| 1077 | UCAACACUCGCCCCACACG | 4101 | CGUGUGGGGCGAGUGUUGA |
| 1079 | AACACUCGCCCCACACGAG | 4103 | CUCGUGUGGGGCGAGUGUU |
| 1081 | CACUCGCCCCACACGAGGC | 4105 | GCCUCGUGUGGGGCGAGUG |
| 1082 | ACUCGCCCCACACGAGGCU | 4106 | AGCCUCGUGTGGGGCGAGU |
| 1083 | CUCGCCCCACACGAGGCUG | 4107 | CAGCCUCGUGUGGGGCGAG |
| 1162 | AACAAUGGGGUUGGGUACC | 4186 | GGUACCCAACCCCAUUGUU |
| 1163 | ACAAUGGGGUUGGGUACCG | 4187 | CGGUACCCAACCCCAUUGU |
| 1164 | CAAUGGGGUUGGGUACCGG | 4188 | CCGGUACCCAACCCCAUUG |
| 1170 | GGUUGGGUACCGGGGCACC | 4194 | GGUGCCCCGGUACCCAACC |
| 1220 | AGGCUUGGAGCCACAAGUU | 4244 | AACUUGUGGCUCCAAGCCU |
| 1298 | GUAACCCUGAUGGCGACCC | 4322 | GGGUCGCCAUCAGGGUUAC |
| 1309 | GGCGACCCCGGAGGUCCUU | 4333 | AAGGACCUCCGGGGUCGCC |
| 1311 | CGACCCCGGAGGUCCUUGG | 4335 | CCAAGGACCUCCGGGGUCG |
| 1312 | GACCCCGGAGGUCCUUGGU | 4336 | ACCAAGGACCUCCGGGGUC |
| 1313 | ACCCCGGAGGUCCUUGGUG | 4337 | CACCAAGGACCUCCGGGGU |
| 1314 | CCCCGGAGGUCCUUGGUGC | 4338 | GCACCAAGGACCUCCGGGG |
| 1364 | GCUGCGGCAUCAAAUCCUG | 4388 | CAGGAUUUGAUGCCGCAGC |
| 1365 | CUGCGGCAUCAAAUCCUGC | 4389 | GCAGGAUUUGAUGCCGCAG |
| 1366 | UGCGGCAUCAAAUCCUGCC | 4390 | GGCAGGAUUUGAUGCCGCA |
| 1367 | GCGGCAUCAAAUCCUGCCG | 4391 | CGGCAGGAUUUGAUGCCGC |
| 1368 | CGGCAUCAAAUCCUGCCGG | 4392 | CCGGCAGGAUUUGAUGCCG |
| 1369 | GGCAUCAAAUCCUGCCGGG | 4393 | CCCGGCAGGAUUUGAUGCC |
| 1370 | GCAUCAAAUCCUGCCGGGA | 4394 | UCCCGGCAGGAUUUGAUGC |
| 1371 | CAUCAAAUCCUGCCGGGAG | 4395 | CUCCCGGCAGGAUUUGAUG |
| 1373 | UCAAAUCCUGCCGGGAGGC | 4397 | GCCUCCCGGCAGGAUUUGA |
| 1375 | AAAUCCUGCCGGGAGGCCG | 4399 | CGGCCUCCCGGCAGGAUUU |
| 1376 | AAUCCUGCCGGGAGGCCGC | 4400 | GCGGCCUCCCGGCAGGAUU |
| 1440 | CACGGAGUCAGGGCGCGAG | 4464 | CUCGCGCCCUGACUCCGUG |
| 1490 | AGCACCCCUUCGAGCCGGG | 4514 | CCCGGCUCGAAGGGGUGCU |
| 1530 | GGACGACAACUAUUGCCGG | 4554 | CCGGCAAUAGUUGUCGUCC |
| 1531 | GACGACAACUAUUGCCGGA | 4555 | UCCGGCAAUAGUUGUCGUC |
| 1532 | ACGACAACUAUUGCCGGAA | 4556 | UUCCGGCAAUAGUUGUCGU |
| 1533 | CGACAACUAUUGCCGGAAU | 4557 | AUUCCGGCAAUAGUUGUCG |
| 1534 | GACAACUAUUGCCGGAAUC | 4558 | GAUUCCGGCAAUAGUUGUC |
| 1538 | ACUAUUGCCGGAAUCCUGA | 4562 | UCAGGAUUCCGGCAAUAGU |
| 1543 | UGCCGGAAUCCUGACGGCU | 4567 | AGCCGUCAGGAUUCCGGCA |
| 1544 | GCCGGAAUCCUGACGGCUC | 4568 | GAGCCGUCAGGAUUCCGGC |
| 1545 | CCGGAAUCCUGACGGCUCC | 4569 | GGAGCCGUCAGGAUUCCGG |
| 1577 | GCUACACUACGGAUCCGCA | 4601 | UGCGGAUCCGUAGUGUAGC |
| 1578 | CUACACUACGGAUCCGCAG | 4602 | CUGCGGAUCCGUAGUGUAG |
| 1579 | UACACUACGGAUCCGCAGA | 4603 | UCUGCGGAUCCGUAGUGUA |
| 1597 | AUCGAGCGAGAGUUCUGUG | 4621 | CACAGAACUCUCGCUCGAU |
| 1598 | UCGAGCGAGAGUUCUGUGA | 4622 | UCACAGAACUCUCGCUCGA |
| 1600 | GAGCGAGAGUUCUGUGACC | 4624 | GGUCACAGAACUCUCGCUC |
| 1601 | AGCGAGAGUUCUGUGACCU | 4625 | AGGUCACAGAACUCUCGCU |
| 1946 | CAGGGGAGCAGUACCGCGG | 4970 | CCGCGGUACUGCUCCCCUG |
| 1947 | AGGGGAGCAGUACCGCGGC | 4971 | GCCGCGGUACUGCUCCCCU |
| 1950 | GGAGCAGUACCGCGGCACG | 4974 | CGUGCCGCGGUACUGCUCC |
| 1951 | GAGCAGUACCGCGGCACGG | 4975 | CCGUGCCGCGGUACUGCUC |
| 1953 | GCAGUACCGCGGCACGGUC | 4977 | GACCGUGCCGCGGUACUGC |
| 1954 | CAGUACCGCGGCACGGUCA | 4978 | UGACCGUGCCGCGGUACUG |
| 1955 | AGUACCGCGGCACGGUCAG | 4979 | CUGACCGUGCCGCGGUACU |
| 1956 | GUACCGCGGCACGGUCAGC | 4980 | GCUGACCGUGCCGCGGUAC |
| 1957 | UACCGCGGCACGGUCAGCA | 4981 | UGCUGACCGUGCCGCGGUA |
| 1959 | CCGCGGCACGGUCAGCAAG | 4983 | CUUGCUGACCGUGCCGCGG |
| 1960 | CGCGGCACGGUCAGCAAGA | 4984 | UCUUGCUGACCGUGCCGCG |
| 1961 | GCGGCACGGUCAGCAAGAC | 4985 | GUCUUGCUGACCGUGCCGC |
| 1963 | GGCACGGUCAGCAAGACCC | 4987 | GGGUCUUGCUGACCGUGCC |
| 1965 | CACGGUCAGCAAGACCCGC | 4989 | GCGGGUCUUGCUGACCGUG |
| 1968 | GGUCAGCAAGACCCGCAAG | 4992 | CUUGCGGGUCUUGCUGACC |
| 1971 | CAGCAAGACCCGCAAGGGU | 4995 | ACCCUUGCGGGUCUUGCUG |
| 1972 | AGCAAGACCCGCAAGGGUG | 4996 | CACCCUUGCGGGUCUUGCU |
| 1974 | CAAGACCCGCAAGGGUGUC | 4998 | GACACCCUUGCGGGUCUUG |
| 1975 | AAGACCCGCAAGGGUGUCC | 4999 | GGACACCCUUGCGGGUCUU |
| 1976 | AGACCCGCAAGGGUGUCCA | 5000 | UGGACACCCUUGCGGGUCU |
| 1977 | GACCCGCAAGGGUGUCCAG | 5001 | CUGGACACCCUUGCGGGUC |
| 1979 | CCCGCAAGGGUGUCCAGUG | 5003 | CACUGGACACCCUUGCGGG |
| 1980 | CCGCAAGGGUGUCCAGUGC | 5004 | GCACUGGACACCCUUGCGG |
| 1995 | GUGCCAGCGCUGGUCCGCU | 5019 | AGCGGACCAGCGCUGGCAC |
| 1997 | GCCAGCGCUGGUCCGCUGA | 5021 | UCAGCGGACCAGCGCUGGC |
| 1998 | CCAGCGCUGGUCCGCUGAG | 5022 | CUCAGCGGACCAGCGCUGG |
| 2000 | AGCGCUGGUCCGCUGAGAC | 5024 | GUCUCAGCGGACCAGCGCU |
| 2001 | GCGCUGGUCCGCUGAGACG | 5025 | CGUCUCAGCGGACCAGCGC |
| 2019 | GCCGCACAAGCCGCAGUUC | 5043 | GAACUGCGGCUUGUGCGGC |
| 2020 | CCGCACAAGCCGCAGUUCA | 5044 | UGAACUGCGGCUUGUGCGG |
| 2022 | GCACAAGCCGCAGUUCACG | 5046 | CGUGAACUGCGGCUUGUGC |
| 2023 | CACAAGCCGCAGUUCACGU | 5047 | ACGUGAACUGCGGCUUGUG |
| 2024 | ACAAGCCGCAGUUCACGUU | 5048 | AACGUGAACUGCGGCUUGU |
| 2025 | CAAGCCGCAGUUCACGUUU | 5049 | AAACGUGAACUGCGGCUUG |
| 2026 | AAGCCGCAGUUCACGUUUA | 5050 | UAAACGUGAACUGCGGCUU |
| 2027 | AGCCGCAGUUCACGUUUAC | 5051 | GUAAACGUGAACUGCGGCU |
| 2029 | CCGCAGUUCACGUUUACCU | 5053 | AGGUAAACGUGAACUGCGG |
| 2083 | CGGAACCCAGAUGGGGAUA | 5107 | UAUCCCCAUCUGGGUUCCG |
| 2084 | GGAACCCAGAUGGGGAUAG | 5108 | CUAUCCCCAUCUGGGUUCC |
| 2086 | AACCCAGAUGGGGAUAGCC | 5110 | GGCUAUCCCCAUCUGGGUU |
| 2087 | ACCCAGAUGGGGAUAGCCA | 5111 | UGGCUAUCCCCAUCUGGGU |
| 2090 | CAGAUGGGGAUAGCCAUGG | 5114 | CCAUGGCUAUCCCCAUCUG |
| 2094 | UGGGGAUAGCCAUGGGCCC | 5118 | GGGCCCAUGGCUAUCCCCA |
| 2099 | AUAGCCAUGGGCCCUGGUG | 5123 | CACCAGGGCCCAUGGCUAU |
| 2115 | GUGCUACACGAUGGACCCA | 5139 | UGGGUCCAUCGUGUAGCAC |
| 2139 | CCCAUUCGACUACUGUGCC | 5163 | GGCACAGUAGUCGAAUGGG |
| 2140 | CCAUUCGACUACUGUGCCC | 5164 | GGGCACAGUAGUCGAAUGG |
| 2141 | CAUUCGACUACUGUGCCCU | 5165 | AGGGCACAGUAGUCGAAUG |
| 2142 | AUUCGACUACUGUGCCCUG | 5166 | CAGGGCACAGUAGUCGAAU |
| 2145 | CGACUACUGUGCCCUGCGA | 5169 | UCGCAGGGCACAGUAGUCG |
| 2146 | GACUACUGUGCCCUGCGAC | 5170 | GUCGCAGGGCACAGUAGUC |
| 2148 | CUACUGUGCCCUGCGACGC | 5172 | GCGUCGCAGGGCACAGUAG |
| 2149 | UACUGUGCCCUGCGACGCU | 5173 | AGCGUCGCAGGGCACAGUA |
| 2151 | CUGUGCCCUGCGACGCUGC | 5175 | GCAGCGUCGCAGGGCACAG |
| 2157 | CCUGCGACGCUGCGCUGAU | 5181 | AUCAGCGCAGCGUCGCAGG |
| 2159 | UGCGACGCUGCGCUGAUGA | 5183 | UCAUCAGCGCAGCGUCGCA |
| 2160 | GCGACGCUGCGCUGAUGAC | 5184 | GUCAUCAGCGCAGCGUCGC |
| 2161 | CGACGCUGCGCUGAUGACC | 5185 | GGUCAUCAGCGCAGCGUCG |
| 2162 | GACGCUGCGCUGAUGACCA | 5186 | UGGUCAUCAGCGCAGCGUC |
| 2163 | ACGCUGCGCUGAUGACCAG | 5187 | CUGGUCAUCAGCGCAGCGU |
| 2167 | UGCGCUGAUGACCAGCCGC | 5191 | GCGGCUGGUCAUCAGCGCA |
| 2168 | GCGCUGAUGACCAGCCGCC | 5192 | GGCGGCUGGUCAUCAGCGC |
| 2172 | UGAUGACCAGCCGCCAUCA | 5196 | UGAUGGCGGCUGGUCAUCA |
| 2173 | GAUGACCAGCCGCCAUCAA | 5197 | UUGAUGGCGGCUGGUCAUC |
| 2175 | UGACCAGCCGCCAUCAAUC | 5199 | GAUUGAUGGCGGCUGGUCA |
| 2181 | GCCGCCAUCAAUCCUGGAC | 5205 | GUCCAGGAUUGAUGGCGGC |
| 2183 | CGCCAUCAAUCCUGGACCC | 5207 | GGGUCCAGGAUUGAUGGCG |
| 2228 | GUGGCAAGAGGGUGGAUCG | 5252 | CGAUCCACCCUCUUGCCAC |
| 2288 | AUCCGGGCAACUCACCCUG | 5312 | CAGGGUGAGUUGCCCGGAU |
| 2289 | UCCGGGCAACUCACCCUGG | 5313 | CCAGGGUGAGUUGCCCGGA |
| 2307 | GACAGUCAGCUUGCGGAAU | 5331 | AUUCCGCAAGCUGACUGUC |
| 2308 | ACAGUCAGCUUGCGGAAUC | 5332 | GAUUCCGCAAGCUGACUGU |
| 2310 | AGUCAGCUUGCGGAAUCGG | 5334 | CCGAUUCCGCAAGCUGACU |
| 2369 | AGUGGAUACUGACUGCCCG | 5393 | CGGGCAGUCAGUAUCCACU |
| 2371 | UGGAUACUGACUGCCCGGC | 5395 | GCCGGGCAGUCAGUAUCCA |
| 2372 | GGAUACUGACUGCCCGGCA | 5396 | UGCCGGGCAGUCAGUAUCC |
| 2374 | AUACUGACUGCCCGGCAGU | 5398 | ACUGCCGGGCAGUCAGUAU |
| 2375 | UACUGACUGCCCGGCAGUG | 5399 | CACUGCCGGGCAGUCAGUA |
| 2378 | UGACUGCCCGGCAGUGCUU | 5402 | AAGCACUGCCGGGCAGUCA |
| 2382 | UGCCCGGCAGUGCUUCUCC | 5406 | GGAGAAGCACUGCCGGGCA |
| 2420 | CGGGCUAUGAGGUAUGGUU | 5444 | AACCAUACCUCAUAGCCCG |
| 2421 | GGGCUAUGAGGUAUGGUUG | 5445 | CAACCAUACCUCAUAGCCC |
| 2431 | GUAUGGUUGGGCACCCUGU | 5455 | ACAGGGUGCCCAACCAUAC |
| 2476 | AGCCUACAGCGGGUCCCAG | 5500 | CUGGGACCCGCUGUAGGCU |
| 2479 | CUACAGCGGGUCCCAGUAG | 5503 | CUACUGGGACCCGCUGUAG |
| 2480 | UACAGCGGGUCCCAGUAGC | 5504 | GCUACUGGGACCCGCUGUA |
| 2481 | ACAGCGGGUCCCAGUAGCC | 5505 | GGCUACUGGGACCCGCUGU |
| 2482 | CAGCGGGUCCCAGUAGCCA | 5506 | UGGCUACUGGGACCCGCUG |
| 2483 | AGCGGGUCCCAGUAGCCAA | 5507 | UUGGCUACUGGGACCCGCU |
| 2484 | GCGGGUCCCAGUAGCCAAG | 5508 | CUUGGCUACUGGGACCCGC |
| 2517 | CUCAGGCUCCCAGCUUGUC | 5541 | GACAAGCUGGGAGCCUGAG |
| 2645 | GGGGUGAGACCAAAGGUAC | 5669 | GUACCUUUGGUCUCACCCC |
| 2646 | GGGUGAGACCAAAGGUACG | 5670 | CGUACCUUUGGUCUCACCC |
| 2666 | GUAAUGACACAGUCCUAAA | 5690 | UUUAGGACUGUGUCAUUAC |
| 2667 | UAAUGACACAGUCCUAAAU | 5691 | AUUUAGGACUGUGUCAUUA |
| 2670 | UGACACAGUCCUAAAUGUG | 5694 | CACAUUUAGGACUGUGUCA |
| 2673 | CACAGUCCUAAAUGUGGCC | 5697 | GGCCACAUUUAGGACUGUG |
| 2675 | CAGUCCUAAAUGUGGCCUU | 5699 | AAGGCCACAUUUAGGACUG |
| 2676 | AGUCCUAAAUGUGGCCUUG | 5700 | CAAGGCCACAUUUAGGACU |
| 2707 | UCCAACCAGGAGUGUAACA | 5731 | UGUUACACUCCUGGUUGGA |
| 2709 | CAACCAGGAGUGUAACAUC | 5733 | GAUGUUACACUCCUGGUUG |
| 2710 | AACCAGGAGUGUAACAUCA | 5734 | UGAUGUUACACUCCUGGUU |
| 2712 | CCAGGAGUGUAACAUCAAG | 5736 | CUUGAUGUUACACUCCUGG |
| 2715 | GGAGUGUAACAUCAAGCAC | 5739 | GUGCUUGAUGUUACACUCC |
| 2716 | GAGUGUAACAUCAAGCACC | 5740 | GGUGCUUGAUGUUACACUC |
| 2718 | GUGUAACAUCAAGCACCGA | 5742 | UCGGUGCUUGAUGUUACAC |
| 2723 | ACAUCAAGCACCGAGGACG | 5747 | CGUCCUCGGUGCUUGAUGU |
| 2725 | AUCAAGCACCGAGGACGUG | 5749 | CACGUCCUCGGUGCUUGAU |
| 2815 | CCACUUGCCUGCUUUACCC | 5839 | GGGUAAAGCAGGCAAGUGG |
| 2820 | UGCCUGCUUUACCCACAAC | 5844 | GUUGUGGGUAAAGCAGGCA |
| 2857 | AUUAUAAUCCCCAACCGAG | 5881 | CUCGGUUGGGGAUUAUAAU |
| 2859 | UAUAAUCCCCAACCGAGUA | 5883 | UACUCGGUUGGGGAUUAUA |
| 2902 | GUCUUCACGCGUGUCUCUG | 5926 | CAGAGACACGCGUGAAGAC |
| 2903 | UCUUCACGCGUGUCUCUGU | 5927 | ACAGAGACACGCGUGAAGA |
| 2907 | CACGCGUGUCUCUGUGUUU | 5931 | AAACACAGAGACACGCGUG |
| 2998 | AACUUCUUGUCAGACAUAA | 6022 | UUAUGUCUGACAAGAAGUU |
| 2999 | ACUUCUUGUCAGACAUAAA | 6023 | UUUAUGUCUGACAAGAAGU |
| 3000 | CUUCUUGUCAGACAUAAAG | 6024 | CUUUAUGUCUGACAAGAAG |
| 3002 | UCUUGUCAGACAUAAAGCC | 6026 | GGCUUUAUGUCUGACAAGA |

[0277] The siRNAs in subset B have the following characteristics:
[0278] Cross-reactivity: With 19mer in human MST1 mRNA, with 17mer/19mer in NHP MST1
[0279] Specificity category: For human and NHP: AS2 or better, SS3 or better
[0280] miRNA seeds: AS+SS strand: seed region not conserved in human, mouse, and rat and not present in >4 species
[0281] Off-target frequency: ≤15 human off-targets matched with 2 mismatches in antisense strand
[0282] SNPs: siRNA target sites do not harbor SNPs with a MAF ≥100 (pos. 2-18)

[0283] The siRNA sequences in subset B were further selected for absence of seed regions in the AS strand that are identical to a seed region of known human miRNA to yield subset C. Subset C includes 140 siRNAs whose base sequences are shown in Table 5.

TABLE 5
Sequences in siRNA subset C

| SEQ | | SEQ | |
|---|---|---|---|
| ID | sense strand | ID | antisense strand |
| NO: | sequence (5′-3′) | NO: | sequence (5′-3′) |
| 474 | AAAAGUUUAAUGUCACCCA | 3498 | UGGGUGACAUUAAACUUUU |
| 638 | GCCCUUGCAACUGACCUAU | 3662 | AUAGGUCAGUUGCAAGGGC |
| 639 | CCCUUGCAACUGACCUAUG | 3663 | CAUAGGUCAGUUGCAAGGG |
| 642 | UUGCAACUGACCUAUGGGA | 3666 | UCCCAUAGGUCAGUUGCAA |
| 643 | UGCAACUGACCUAUGGGAC | 3667 | GUCCCAUAGGUCAGUUGCA |
| 646 | AACUGACCUAUGGGACCUG | 3670 | CAGGUCCCAUAGGUCAGUU |
| 742 | GAGCCACCCAAUCCCGUAG | 3766 | CUACGGGAUUGGGUGGCUC |
| 743 | AGCCACCCAAUCCCGUAGG | 3767 | CCUACGGGAUUGGGUGGCU |
| 747 | ACCCAAUCCCGUAGGGACA | 3771 | UGUCCCUACGGGAUUGGGU |
| 749 | CCAAUCCCGUAGGGACAGG | 3773 | CCUGUCCCUACGGGAUUGG |
| 751 | AAUCCCGUAGGGACAGGUU | 3775 | AACCUGUCCCUACGGGAUU |
| 753 | UCCCGUAGGGACAGGUUUC | 3777 | GAAACCUGUCCCUACGGGA |
| 1041 | CGUGAGCAGCCAUGGUUGC | 4065 | GCAACCAUGGCUGCUCACG |
| 1042 | GUGAGCAGCCAUGGUUGCC | 4066 | GGCAACCAUGGCUGCUCAC |
| 1070 | CAUGGACUCAACACUCGCC | 4094 | GGCGAGUGUUGAGUCCAUG |
| 1071 | AUGGACUCAACACUCGCCC | 4095 | GGGCGAGUGUUGAGUCCAU |
| 1079 | AACACUCGCCCCACACGAG | 4103 | CUCGUGUGGGGCGAGUGUU |
| 1081 | CACUCGCCCCACACGAGGC | 4105 | GCCUCGUGUGGGGCGAGUG |
| 1082 | ACUCGCCCCACACGAGGCU | 4106 | AGCCUCGUGUGGGGCGAGU |
| 1162 | AACAAUGGGGUUGGGUACC | 4186 | GGUACCCAACCCCAUUGUU |
| 1163 | ACAAUGGGGUUGGGUACCG | 4187 | CGGUACCCAACCCCAUUGU |
| 1164 | CAAUGGGGUUGGGUACCGG | 4188 | CCGGUACCCAACCCCAUUG |
| 1170 | GGUUGGGUACCGGGGCACC | 4194 | GGUGCCCCGGUACCCAACC |
| 1220 | AGGCUUGGAGCCACAAGUU | 4244 | AACUUGUGGCUCCAAGCCU |
| 1309 | GGCGACCCCGGAGGUCCUU | 4333 | AAGGACCUCCGGGGUCGCC |
| 1312 | GACCCCGGAGGUCCUUGGU | 4336 | ACCAAGGACCUCCGGGGUC |
| 1313 | ACCCCGGAGGUCCUUGGUG | 4337 | CACCAAGGACCUCCGGGGU |
| 1314 | CCCCGGAGGUCCUUGGUGC | 4338 | GCACCAAGGACCUCCGGGG |
| 1365 | CUGCGGCAUCAAAUCCUGC | 4389 | GCAGGAUUUGAUGCCGCAG |
| 1368 | CGGCAUCAAAUCCUGCCGG | 4392 | CCGGCAGGAUUUGAUGCCG |
| 1369 | GGCAUCAAAUCCUGCCGGG | 4393 | CCCGGCAGGAUUUGAUGCC |
| 1370 | GCAUCAAAUCCUGCCGGGA | 4394 | UCCCGGCAGGAUUUGAUGC |
| 1371 | CAUCAAAUCCUGCCGGGAG | 4395 | CUCCCGGCAGGAUUUGAUG |
| 1373 | UCAAAUCCUGCCGGGAGGC | 4397 | GCCUCCCGGCAGGAUUUGA |
| 1440 | CACGGAGUCAGGGCGCGAG | 4464 | CUCGCGCCCUGACUCCGUG |
| 1490 | AGCACCCCUUCGAGCCGGG | 4514 | CCCGGCUCGAAGGGGUGCU |
| 1530 | GGACGACAACUAUUGCCGG | 4554 | CCGGCAAUAGUUGUCGUCC |
| 1531 | GACGACAACUAUUGCCGGA | 4555 | UCCGGCAAUAGUUGUCGUC |
| 1532 | ACGACAACUAUUGCCGGAA | 4556 | UUCCGGCAAUAGUUGUCGU |
| 1534 | GACAACUAUUGCCGGAAUC | 4558 | GAUUCCGGCAAUAGUUGUC |
| 1538 | ACUAUUGCCGGAAUCCUGA | 4562 | UCAGGAUUCCGGCAAUAGU |
| 1543 | UGCCGGAAUCCUGACGGCU | 4567 | AGCCGUCAGGAUUCCGGCA |
| 1544 | GCCGGAAUCCUGACGGCUC | 4568 | GAGCCGUCAGGAUUCCGGC |
| 1577 | GCUACACUACGGAUCCGCA | 4601 | UGCGGAUCCGUAGUGUAGC |
| 1597 | AUCGAGCGAGAGUUCUGUG | 4621 | CACAGAACUCUCGCUCGAU |
| 1598 | UCGAGCGAGAGUUCUGUGA | 4622 | UCACAGAACUCUCGCUCGA |
| 1601 | AGCGAGAGUUCUGUGACCU | 4625 | AGGUCACAGAACUCUCGCU |
| 1947 | AGGGGAGCAGUACCGCGGC | 4971 | GCCGCGGUACUGCUCCCCU |
| 1950 | GGAGCAGUACCGCGGCACG | 4974 | CGUGCCGCGGUACUGCUCC |
| 1951 | GAGCAGUACCGCGGCACGG | 4975 | CCGUGCCGCGGUACUGCUC |
| 1953 | GCAGUACCGCGGCACGGUC | 4977 | GACCGUGCCGCGGUACUGC |
| 1954 | CAGUACCGCGGCACGGUCA | 4978 | UGACCGUGCCGCGGUACUG |
| 1955 | AGUACCGCGGCACGGUCAG | 4979 | CUGACCGUGCCGCGGUACU |
| 1957 | UACCGCGGCACGGUCAGCA | 4981 | UGCUGACCGUGCCGCGGUA |
| 1959 | CCGCGGCACGGUCAGCAAG | 4983 | CUUGCUGACCGUGCCGCGG |
| 1960 | CGCGGCACGGUCAGCAAGA | 4984 | UCUUGCUGACCGUGCCGCG |
| 1961 | GCGGCACGGUCAGCAAGAC | 4985 | GUCUUGCUGACCGUGCCGC |
| 1963 | GGCACGGUCAGCAAGACCC | 4987 | GGGUCUUGCUGACCGUGCC |
| 1965 | CACGGUCAGCAAGACCCGC | 4989 | GCGGGUCUUGCUGACCGUG |
| 1968 | GGUCAGCAAGACCCGCAAG | 4992 | CUUGCGGGUCUUGCUGACC |
| 1972 | AGCAAGACCCGCAAGGGUG | 4996 | CACCCUUGCGGGUCUUGCU |
| 1974 | CAAGACCCGCAAGGGUGUC | 4998 | GACACCCUUGCGGGUCUUG |
| 1975 | AAGACCCGCAAGGGUGUCC | 4999 | GGACACCCUUGCGGGUCUU |
| 1976 | AGACCCGCAAGGGUGUCCA | 5000 | UGGACACCCUUGCGGGUCU |
| 1980 | CCGCAAGGGUGUCCAGUGC | 5004 | GCACUGGACACCCUUGCGG |
| 1995 | GUGCCAGCGCUGGUCCGCU | 5019 | AGCGGACCAGCGCUGGCAC |
| 1997 | GCCAGCGCUGGUCCGCUGA | 5021 | UCAGCGGACCAGCGCUGGC |
| 1998 | CCAGCGCUGGUCCGCUGAG | 5022 | CUCAGCGGACCAGCGCUGG |
| 2000 | AGCGCUGGUCCGCUGAGAC | 5024 | GUCUCAGCGGACCAGCGCU |
| 2001 | GCGCUGGUCCGCUGAGACG | 5025 | CGUCUCAGCGGACCAGCGC |
| 2019 | GCCGCACAAGCCGCAGUUC | 5043 | GAACUGCGGCUUGUGCGGC |
| 2020 | CCGCACAAGCCGCAGUUCA | 5044 | UGAACUGCGGCUUGUGCGG |
| 2022 | GCACAAGCCGCAGUUCACG | 5046 | CGUGAACUGCGGCUUGUGC |
| 2023 | CACAAGCCGCAGUUCACGU | 5047 | ACGUGAACUGCGGCUUGUG |
| 2024 | ACAAGCCGCAGUUCACGUU | 5048 | AACGUGAACUGCGGCUUGU |
| 2025 | CAAGCCGCAGUUCACGUUU | 5049 | AAACGUGAACUGCGGCUUG |
| 2026 | AAGCCGCAGUUCACGUUUA | 5050 | UAAACGUGAACUGCGGCUU |
| 2027 | AGCCGCAGUUCACGUUUAC | 5051 | GUAAACGUGAACUGCGGCU |
| 2029 | CCGCAGUUCACGUUUACCU | 5053 | AGGUAAACGUGAACUGCGG |
| 2083 | CGGAACCCAGAUGGGGAUA | 5107 | UAUCCCCAUCUGGGUUCCG |
| 2084 | GGAACCCAGAUGGGGAUAG | 5108 | CUAUCCCCAUCUGGGUUCC |
| 2086 | AACCCAGAUGGGGAUAGCC | 5110 | GGCUAUCCCCAUCUGGGUU |
| 2087 | ACCCAGAUGGGGAUAGCCA | 5111 | UGGCUAUCCCCAUCUGGGU |
| 2090 | CAGAUGGGGAUAGCCAUGG | 5114 | CCAUGGCUAUCCCCAUCUG |
| 2115 | GUGCUACACGAUGGACCCA | 5139 | UGGGUCCAUCGUGUAGCAC |
| 2139 | CCCAUUCGACUACUGUGCC | 5163 | GGCACAGUAGUCGAAUGGG |
| 2140 | CCAUUCGACUACUGUGCCC | 5164 | GGGCACAGUAGUCGAAUGG |
| 2141 | CAUUCGACUACUGUGCCCU | 5165 | AGGGCACAGUAGUCGAAUG |
| 2145 | CGACUACUGUGCCCUGCGA | 5169 | UCGCAGGGCACAGUAGUCG |
| 2146 | GACUACUGUGCCCUGCGAC | 5170 | GUCGCAGGGCACAGUAGUC |
| 2149 | UACUGUGCCCUGCGACGCU | 5173 | AGCGUCGCAGGGCACAGUA |
| 2151 | CUGUGCCCUGCGACGCUGC | 5175 | GCAGCGUCGCAGGGCACAG |
| 2157 | CCUGCGACGCUGCGCUGAU | 5181 | AUCAGCGCAGCGUCGCAGG |
| 2159 | UGCGACGCUGCGCUGAUGA | 5183 | UCAUCAGCGCAGCGUCGCA |
| 2160 | GCGACGCUGCGCUGAUGAC | 5184 | GUCAUCAGCGCAGCGUCGC |
| 2161 | CGACGCUGCGCUGAUGACC | 5185 | GGUCAUCAGCGCAGCGUCG |
| 2162 | GACGCUGCGCUGAUGACCA | 5186 | UGGUCAUCAGCGCAGCGUC |
| 2168 | GCGCUGAUGACCAGCCGCC | 5192 | GGCGGCUGGUCAUCAGCGC |
| 2172 | UGAUGACCAGCCGCCAUCA | 5196 | UGAUGGCGGCUGGUCAUCA |
| 2175 | UGACCAGCCGCCAUCAAUC | 5199 | GAUUGAUGGCGGCUGGUCA |
| 2181 | GCCGCCAUCAAUCCUGGAC | 5205 | GUCCAGGAUUGAUGGCGGC |
| 2183 | CGCCAUCAAUCCUGGACCC | 5207 | GGGUCCAGGAUUGAUGGCG |
| 2228 | GUGGCAAGAGGGUGGAUCG | 5252 | CGAUCCACCCUCUUGCCAC |
| 2288 | AUCCGGGCAACUCACCCUG | 5312 | CAGGGUGAGUUGCCCGGAU |
| 2308 | ACAGUCAGCUUGCGGAAUC | 5332 | GAUUCCGCAAGCUGACUGU |
| 2310 | AGUCAGCUUGCGGAAUCGG | 5334 | CCGAUUCCGCAAGCUGACU |
| 2371 | UGGAUACUGACUGCCCGGC | 5395 | GCCGGGCAGUCAGUAUCCA |
| 2372 | GGAUACUGACUGCCCGGCA | 5396 | UGCCGGGCAGUCAGUAUCC |
| 2374 | AUACUGACUGCCCGGCAGU | 5398 | ACUGCCGGGCAGUCAGUAU |
| 2375 | UACUGACUGCCCGGCAGUG | 5399 | CACUGCCGGGCAGUCAGUA |
| 2378 | UGACUGCCCGGCAGUGCUU | 5402 | AAGCACUGCCGGGCAGUCA |
| 2420 | CGGGCUAUGAGGUAUGGUU | 5444 | AACCAUACCUCAUAGCCCG |
| 2421 | GGGCUAUGAGGUAUGGUUG | 5445 | CAACCAUACCUCAUAGCCC |
| 2479 | CUACAGCGGGUCCCAGUAG | 5503 | CUACUGGGACCCGCUGUAG |
| 2480 | UACAGCGGGUCCCAGUAGC | 5504 | GCUACUGGGACCCGCUGUA |
| 2481 | ACAGCGGGUCCCAGUAGCC | 5505 | GGCUACUGGGACCCGCUGU |
| 2482 | CAGCGGGUCCCAGUAGCCA | 5506 | UGGCUACUGGGACCCGCUG |
| 2483 | AGCGGGUCCCAGUAGCCAA | 5507 | UUGGCUACUGGGACCCGCU |
| 2484 | GCGGGUCCCAGUAGCCAAG | 5508 | CUUGGCUACUGGGACCCGC |
| 2517 | CUCAGGCUCCCAGCUUGUC | 5541 | GACAAGCUGGGAGCCUGAG |
| 2646 | GGGUGAGACCAAAGGUACG | 5670 | CGUACCUUUGGUCUCACCC |
| 2667 | UAAUGACACAGUCCUAAAU | 5691 | AUUUAGGACUGUGUCAUUA |
| 2670 | UGACACAGUCCUAAAUGUG | 5694 | CACAUUUAGGACUGUGUCA |
| 2673 | CACAGUCCUAAAUGUGGCC | 5697 | GGCCACAUUUAGGACUGUG |
| 2707 | UCCAACCAGGAGUGUAACA | 5731 | UGUUACACUCCUGGUUGGA |
| 2709 | CAACCAGGAGUGUAACAUC | 5733 | GAUGUUACACUCCUGGUUG |
| 2710 | AACCAGGAGUGUAACAUCA | 5734 | UGAUGUUACACUCCUGGUU |
| 2712 | CCAGGAGUGUAACAUCAAG | 5736 | CUUGAUGUUACACUCCUGG |
| 2715 | GGAGUGUAACAUCAAGCAC | 5739 | GUGCUUGAUGUUACACUCC |
| 2725 | AUCAAGCACCGAGGACGUG | 5749 | CACGUCCUCGGUGCUUGAU |
| 2815 | CCACUUGCCUGCUUUACCC | 5839 | GGGUAAAGCAGGCAAGUGG |
| 2820 | UGCCUGCUUUACCCACAAC | 5844 | GUUGUGGGUAAAGCAGGCA |
| 2857 | AUUAUAAUCCCCAACCGAG | 5881 | CUCGGUUGGGGAUUAUAAU |
| 2859 | UAUAAUCCCCAACCGAGUA | 5883 | UACUCGGUUGGGGAUUAUA |
| 2902 | GUCUUCACGCGUGUCUCUG | 5926 | CAGAGACACGCGUGAAGAC |
| 2907 | CACGCGUGUCUCUGUGUUU | 5931 | AAACACAGAGACACGCGUG |
| 2998 | AACUUCUUGUCAGACAUAA | 6022 | UUAUGUCUGACAAGAAGUU |
| 2999 | ACUUCUUGUCAGACAUAAA | 6023 | UUUAUGUCUGACAAGAAGU |
| 3000 | CUUCUUGUCAGACAUAAAG | 6024 | CUUUAUGUCUGACAAGAAG |
| 3002 | UCUUGUCAGACAUAAAGCC | 6026 | GGCUUUAUGUCUGACAAGA |

[0284] The siRNAs in subset C have the following characteristics:
[0285] Cross-reactivity: With 19mer in human MST1 mRNA, with 17mer/19mer in NHP MST1
[0286] Specificity category: For human and NHP: AS2 or better, SS3 or better
[0287] miRNA seeds: AS+SS strand: seed region not conserved in human, mouse, and rat and not present in >4 species. AS strand: seed region not identical to seed region of known human miRNA
[0288] Off-target frequency: ≤15 human off-targets matched with 2 mismatches by antisense strand
[0289] SNPs: siRNA target sites do not harbor SNPs with a MAF ≥1% (pos. 2-18)

[0290] The siRNA sequences in subset C were also selected for absence of seed regions in the AS or S strands that are identical to a seed region of known human miRNA to yield subset D. Subset D includes 102 siRNAs whose base sequences are shown in Table 6.

TABLE 6
Sequences in siRNA subset D

| SEQ | | SEQ | |
|---|---|---|---|
| ID | sense strand | ID | antisense strand |
| NO: | sequence (5′-3′) | NO: | sequence (5′-3′) |
| 598 | CACCAAACCUUCCUAACAC | 3622 | GUGUUAGGAAGGUUUGGUG |
| 642 | UUGCAACUGACCUAUGGGA | 3666 | UCCCAUAGGUCAGUUGCAA |
| 743 | AGCCACCCAAUCCCGUAGG | 3767 | CCUACGGGAUUGGGUGGCU |
| 747 | ACCCAAUCCCGUAGGGACA | 3771 | UGUCCCUACGGGAUUGGGU |
| 749 | CCAAUCCCGUAGGGACAGG | 3773 | CCUGUCCCUACGGGAUUGG |
| 751 | AAUCCCGUAGGGACAGGUU | 3775 | AACCUGUCCCUACGGGAUU |
| 753 | UCCCGUAGGGACAGGUUUC | 3777 | GAAACCUGUCCCUACGGGA |
| 1041 | CGUGAGCAGCCAUGGUUGC | 4065 | GCAACCAUGGCUGCUCACG |
| 1042 | GUGAGCAGCCAUGGUUGCC | 4066 | GGCAACCAUGGCUGCUCAC |
| 1048 | AGCCAUGGUUGCCAACUGC | 4072 | GCAGUUGGCAACCAUGGCU |
| 1070 | CAUGGACUCAACACUCGCC | 4094 | GGCGAGUGUUGAGUCCAUG |
| 1079 | AACACUCGCCCCACACGAG | 4103 | CUCGUGUGGGGCGAGUGUU |
| 1081 | CACUCGCCCCACACGAGGC | 4105 | GCCUCGUGUGGGGCGAGUG |
| 1082 | ACUCGCCCCACACGAGGCU | 4106 | AGCCUCGUGUGGGGCGAGU |
| 1163 | ACAAUGGGGUUGGGUACCG | 4187 | CGGUACCCAACCCCAUUGU |
| 1220 | AGGCUUGGAGCCACAAGUU | 4244 | AACUUGUGGCUCCAAGCCU |
| 1221 | GGCUUGGAGCCACAAGUUC | 4245 | GAACUUGUGGCUCCAAGCC |
| 1266 | UCUCCGGAAUGGCCUGGAA | 4290 | UUCCAGGCCAUUCCGGAGA |
| 1309 | GGCGACCCCGGAGGUCCUU | 4333 | AAGGACCUCCGGGGUCGCC |
| 1312 | GACCCCGGAGGUCCUUGGU | 4336 | ACCAAGGACCUCCGGGGUC |
| 1365 | CUGCGGCAUCAAAUCCUGC | 4389 | GCAGGAUUUGAUGCCGCAG |
| 1368 | CGGCAUCAAAUCCUGCCGG | 4392 | CCGGCAGGAUUUGAUGCCG |
| 1370 | GCAUCAAAUCCUGCCGGGA | 4394 | UCCCGGCAGGAUUUGAUGC |
| 1371 | CAUCAAAUCCUGCCGGGAG | 4395 | CUCCCGGCAGGAUUUGAUG |
| 1381 | UGCCGGGAGGCCGCGUGUG | 4405 | CACACGCGGCCUCCCGGCA |
| 1440 | CACGGAGUCAGGGCGCGAG | 4464 | CUCGCGCCCUGACUCCGUG |
| 1454 | GCGAGUGCCAGCGCUGGGA | 4478 | UCCCAGCGCUGGCACUCGC |
| 1490 | AGCACCCCUUCGAGCCGGG | 4514 | CCCGGCUCGAAGGGGUGCU |
| 1530 | GGACGACAACUAUUGCCGG | 4554 | CCGGCAAUAGUUGUCGUCC |
| 1531 | GACGACAACUAUUGCCGGA | 4555 | UCCGGCAAUAGUUGUCGUC |
| 1532 | ACGACAACUAUUGCCGGAA | 4556 | UUCCGGCAAUAGUUGUCGU |
| 1534 | GACAACUAUUGCCGGAAUC | 4558 | GAUUCCGGCAAUAGUUGUC |
| 1538 | ACUAUUGCCGGAAUCCUGA | 4562 | UCAGGAUUCCGGCAAUAGU |
| 1543 | UGCCGGAAUCCUGACGGCU | 4567 | AGCCGUCAGGAUUCCGGCA |
| 1544 | GCCGGAAUCCUGACGGCUC | 4568 | GAGCCGUCAGGAUUCCGGC |
| 1577 | GCUACACUACGGAUCCGCA | 4601 | UGCGGAUCCGUAGUGUAGC |
| 1597 | AUCGAGCGAGAGUUCUGUG | 4621 | CACAGAACUCUCGCUCGAU |
| 1598 | UCGAGCGAGAGUUCUGUGA | 4622 | UCACAGAACUCUCGCUCGA |
| 1601 | AGCGAGAGUUCUGUGACCU | 4625 | AGGUCACAGAACUCUCGCU |
| 1953 | GCAGUACCGCGGCACGGUC | 4977 | GACCGUGCCGCGGUACUGC |
| 1955 | AGUACCGCGGCACGGUCAG | 4979 | CUGACCGUGCCGCGGUACU |
| 1957 | UACCGCGGCACGGUCAGCA | 4981 | UGCUGACCGUGCCGCGGUA |
| 1959 | CCGCGGCACGGUCAGCAAG | 4983 | CUUGCUGACCGUGCCGCGG |
| 1961 | GCGGCACGGUCAGCAAGAC | 4985 | GUCUUGCUGACCGUGCCGC |
| 1965 | CACGGUCAGCAAGACCCGC | 4989 | GCGGGUCUUGCUGACCGUG |
| 1968 | GGUCAGCAAGACCCGCAAG | 4992 | CUUGCGGGUCUUGCUGACC |
| 1975 | AAGACCCGCAAGGGUGUCC | 4999 | GGACACCCUUGCGGGUCUU |
| 1976 | AGACCCGCAAGGGUGUCCA | 5000 | UGGACACCCUUGCGGGUCU |
| 1980 | CCGCAAGGGUGUCCAGUGC | 5004 | GCACUGGACACCCUUGCGG |
| 1998 | CCAGCGCUGGUCCGCUGAG | 5022 | CUCAGCGGACCAGCGCUGG |
| 2000 | AGCGCUGGUCCGCUGAGAC | 5024 | GUCUCAGCGGACCAGCGCU |
| 2001 | GCGCUGGUCCGCUGAGACG | 5025 | CGUCUCAGCGGACCAGCGC |
| 2019 | GCCGCACAAGCCGCAGUUC | 5043 | GAACUGCGGCUUGUGCGGC |
| 2020 | CCGCACAAGCCGCAGUUCA | 5044 | UGAACUGCGGCUUGUGCGG |
| 2023 | CACAAGCCGCAGUUCACGU | 5047 | ACGUGAACUGCGGCUUGUG |
| 2024 | ACAAGCCGCAGUUCACGUU | 5048 | AACGUGAACUGCGGCUUGU |
| 2025 | CAAGCCGCAGUUCACGUUU | 5049 | AAACGUGAACUGCGGCUUG |
| 2027 | AGCCGCAGUUCACGUUUAC | 5051 | GUAAACGUGAACUGCGGCU |
| 2029 | CCGCAGUUCACGUUUACCU | 5053 | AGGUAAACGUGAACUGCGG |
| 2083 | CGGAACCCAGAUGGGGAUA | 5107 | UAUCCCCAUCUGGGUUCCG |
| 2084 | GGAACCCAGAUGGGGAUAG | 5108 | CUAUCCCCAUCUGGGUUCC |
| 2087 | ACCCAGAUGGGGAUAGCCA | 5111 | UGGCUAUCCCCAUCUGGGU |
| 2090 | CAGAUGGGGAUAGCCAUGG | 5114 | CCAUGGCUAUCCCCAUCUG |
| 2091 | AGAUGGGGAUAGCCAUGGG | 5115 | CCCAUGGCUAUCCCCAUCU |
| 2139 | CCCAUUCGACUACUGUGCC | 5163 | GGCACAGUAGUCGAAUGGG |
| 2140 | CCAUUCGACUACUGUGCCC | 5164 | GGGCACAGUAGUCGAAUGG |
| 2141 | CAUUCGACUACUGUGCCCU | 5165 | AGGGCACAGUAGUCGAAUG |
| 2145 | CGACUACUGUGCCCUGCGA | 5169 | UCGCAGGGCACAGUAGUCG |
| 2146 | GACUACUGUGCCCUGCGAC | 5170 | GUCGCAGGGCACAGUAGUC |
| 2159 | UGCGACGCUGCGCUGAUGA | 5183 | UCAUCAGCGCAGCGUCGCA |
| 2160 | GCGACGCUGCGCUGAUGAC | 5184 | GUCAUCAGCGCAGCGUCGC |
| 2161 | CGACGCUGCGCUGAUGACC | 5185 | GGUCAUCAGCGCAGCGUCG |
| 2162 | GACGCUGCGCUGAUGACCA | 5186 | UGGUCAUCAGCGCAGCGUC |
| 2172 | UGAUGACCAGCCGCCAUCA | 5196 | UGAUGGCGGCUGGUCAUCA |
| 2175 | UGACCAGCCGCCAUCAAUC | 5199 | GAUUGAUGGCGGCUGGUCA |
| 2181 | GCCGCCAUCAAUCCUGGAC | 5205 | GUCCAGGAUUGAUGGCGGC |
| 2183 | CGCCAUCAAUCCUGGACCC | 5207 | GGGUCCAGGAUUGAUGGCG |
| 2228 | GUGGCAAGAGGGUGGAUCG | 5252 | CGAUCCACCCUCUUGCCAC |
| 2310 | AGUCAGCUUGCGGAAUCGG | 5334 | CCGAUUCCGCAAGCUGACU |
| 2371 | UGGAUACUGACUGCCCGGC | 5395 | GCCGGGCAGUCAGUAUCCA |
| 2372 | GGAUACUGACUGCCCGGCA | 5396 | UGCCGGGCAGUCAGUAUCC |
| 2374 | AUACUGACUGCCCGGCAGU | 5398 | ACUGCCGGGCAGUCAGUAU |
| 2421 | GGGCUAUGAGGUAUGGUUG | 5445 | CAACCAUACCUCAUAGCCC |
| 2479 | CUACAGCGGGUCCCAGUAG | 5503 | CUACUGGGACCCGCUGUAG |
| 2480 | UACAGCGGGUCCCAGUAGC | 5504 | GCUACUGGGACCCGCUGUA |
| 2481 | ACAGCGGGUCCCAGUAGCC | 5505 | GGCUACUGGGACCCGCUGU |
| 2484 | GCGGGUCCCAGUAGCCAAG | 5508 | CUUGGCUACUGGGACCCGC |
| 2498 | CCAAGAUGGUGUGUGGGCC | 5522 | GGCCCACACACCAUCUUGG |
| 2517 | CUCAGGCUCCCAGCUUGUC | 5541 | GACAAGCUGGGAGCCUGAG |
| 2628 | GUGUGAGAUUGCAGGCUGG | 5652 | CCAGCCUGCAAUCUCACAC |
| 2667 | UAAUGACACAGUCCUAAAU | 5691 | AUUUAGGACUGUGUCAUUA |
| 2673 | CACAGUCCUAAAUGUGGCC | 5697 | GGCCACAUUUAGGACUGUG |
| 2707 | UCCAACCAGGAGUGUAACA | 5731 | UGUUACACUCCUGGUUGGA |
| 2709 | CAACCAGGAGUGUAACAUC | 5733 | GAUGUUACACUCCUGGUUG |
| 2725 | AUCAAGCACCGAGGACGUG | 5749 | CACGUCCUCGGUGCUUGAU |
| 2844 | GGUCCUGGAAGGAAUUAUA | 5868 | UAUAAUUCCUUCCAGGACC |
| 2857 | AUUAUAAUCCCCAACCGAG | 5881 | CUCGGUUGGGGAUUAUAAU |
| 2859 | UAUAAUCCCCAACCGAGUA | 5883 | UACUCGGUUGGGGAUUAUA |
| 2902 | GUCUUCACGCGUGUCUCUG | 5926 | CAGAGACACGCGUGAAGAC |
| 2907 | CACGCGUGUCUCUGUGUUU | 5931 | AAACACAGAGACACGCGUG |
| 2998 | AACUUCUUGUCAGACAUAA | 6022 | UUAUGUCUGACAAGAAGUU |
| 3004 | UUGUCAGACAUAAAGCCAU | 6028 | AUGGCUUUAUGUCUGACAA |

[0291] The siRNAs in subset D have the following characteristics:
[0292] Cross-reactivity: With 19mer in human MST1 mRNA, with 17mer/19mer in NHP MST1
[0293] Specificity category: For human and NHP: AS2 or better, SS3 or better
[0294] miRNA seeds: AS+SS strand: seed region not conserved in human, mouse, and rat and not present in >4 species. AS+SS strand: seed region not identical to seed region of known human miRNA
[0295] Off-target frequency: <20 human off-targets matched with 2 mismatches by antisense strand
[0296] SNPs: siRNA target sites do not harbor SNPs with a MAF ≥100 (pos. 2-18)

[0297] The siRNA sequences in subset D were further selected for more stringent specificity to yield subset E. Subset E includes 91 siRNAs whose base sequences are shown in Table 7.

TABLE 7
Sequences in siRNA subset E

| SEQ | | SEQ | |
|---|---|---|---|
| ID | sense strand | ID | antisense strand |
| NO: | sequence (5′-3′) | NO: | sequence (5′-3′) |
| 642 | UUGCAACUGACCUAUGGGA | 3666 | UCCCAUAGGUCAGUUGCAA |
| 743 | AGCCACCCAAUCCCGUAGG | 3767 | CCUACGGGAUUGGGUGGCU |
| 747 | ACCCAAUCCCGUAGGGACA | 3771 | UGUCCCUACGGGAUUGGGU |
| 749 | CCAAUCCCGUAGGGACAGG | 3773 | CCUGUCCCUACGGGAUUGG |
| 751 | AAUCCCGUAGGGACAGGUU | 3775 | AACCUGUCCCUACGGGAUU |
| 753 | UCCCGUAGGGACAGGUUUC | 3777 | GAAACCUGUCCCUACGGGA |
| 1041 | CGUGAGCAGCCAUGGUUGC | 4065 | GCAACCAUGGCUGCUCACG |
| 1042 | GUGAGCAGCCAUGGUUGCC | 4066 | GGCAACCAUGGCUGCUCAC |
| 1070 | CAUGGACUCAACACUCGCC | 4094 | GGCGAGUGUUGAGUCCAUG |
| 1079 | AACACUCGCCCCACACGAG | 4103 | CUCGUGUGGGGCGAGUGUU |
| 1081 | CACUCGCCCCACACGAGGC | 4105 | GCCUCGUGUGGGGCGAGUG |
| 1082 | ACUCGCCCCACACGAGGCU | 4106 | AGCCUCGUGUGGGGCGAGU |
| 1163 | ACAAUGGGGUUGGGUACCG | 4187 | CGGUACCCAACCCCAUUGU |
| 1220 | AGGCUUGGAGCCACAAGUU | 4244 | AACUUGUGGCUCCAAGCCU |
| 1309 | GGCGACCCCGGAGGUCCUU | 4333 | AAGGACCUCCGGGGUCGCC |
| 1312 | GACCCCGGAGGUCCUUGGU | 4336 | ACCAAGGACCUCCGGGGUC |
| 1365 | CUGCGGCAUCAAAUCCUGC | 4389 | GCAGGAUUUGAUGCCGCAG |
| 1368 | CGGCAUCAAAUCCUGCCGG | 4392 | CCGGCAGGAUUUGAUGCCG |
| 1370 | GCAUCAAAUCCUGCCGGGA | 4394 | UCCCGGCAGGAUUUGAUGC |
| 1371 | CAUCAAAUCCUGCCGGGAG | 4395 | CUCCCGGCAGGAUUUGAUG |
| 1440 | CACGGAGUCAGGGCGCGAG | 4464 | CUCGCGCCCUGACUCCGUG |
| 1490 | AGCACCCCUUCGAGCCGGG | 4514 | CCCGGCUCGAAGGGGUGCU |
| 1530 | GGACGACAACUAUUGCCGG | 4554 | CCGGCAAUAGUUGUCGUCC |
| 1531 | GACGACAACUAUUGCCGGA | 4555 | UCCGGCAAUAGUUGUCGUC |
| 1532 | ACGACAACUAUUGCCGGAA | 4556 | UUCCGGCAAUAGUUGUCGU |
| 1534 | GACAACUAUUGCCGGAAUC | 4558 | GAUUCCGGCAAUAGUUGUC |
| 1538 | ACUAUUGCCGGAAUCCUGA | 4562 | UCAGGAUUCCGGCAAUAGU |
| 1543 | UGCCGGAAUCCUGACGGCU | 4567 | AGCCGUCAGGAUUCCGGCA |
| 1544 | GCCGGAAUCCUGACGGCUC | 4568 | GAGCCGUCAGGAUUCCGGC |
| 1577 | GCUACACUACGGAUCCGCA | 4601 | UGCGGAUCCGUAGUGUAGC |
| 1597 | AUCGAGCGAGAGUUCUGUG | 4621 | CACAGAACUCUCGCUCGAU |
| 1598 | UCGAGCGAGAGUUCUGUGA | 4622 | UCACAGAACUCUCGCUCGA |
| 1601 | AGCGAGAGUUCUGUGACCU | 4625 | AGGUCACAGAACUCUCGCU |
| 1953 | GCAGUACCGCGGCACGGUC | 4977 | GACCGUGCCGCGGUACUGC |
| 1955 | AGUACCGCGGCACGGUCAG | 4979 | CUGACCGUGCCGCGGUACU |
| 1957 | UACCGCGGCACGGUCAGCA | 4981 | UGCUGACCGUGCCGCGGUA |
| 1959 | CCGCGGCACGGUCAGCAAG | 4983 | CUUGCUGACCGUGCCGCGG |
| 1961 | GCGGCACGGUCAGCAAGAC | 4985 | GUCUUGCUGACCGUGCCGC |
| 1965 | CACGGUCAGCAAGACCCGC | 4989 | GCGGGUCUUGCUGACCGUG |
| 1968 | GGUCAGCAAGACCCGCAAG | 4992 | CUUGCGGGUCUUGCUGACC |
| 1975 | AAGACCCGCAAGGGUGUCC | 4999 | GGACACCCUUGCGGGUCUU |
| 1976 | AGACCCGCAAGGGUGUCCA | 5000 | UGGACACCCUUGCGGGUCU |
| 1980 | CCGCAAGGGUGUCCAGUGC | 5004 | GCACUGGACACCCUUGCGG |
| 1998 | CCAGCGCUGGUCCGCUGAG | 5022 | CUCAGCGGACCAGCGCUGG |
| 2000 | AGCGCUGGUCCGCUGAGAC | 5024 | GUCUCAGCGGACCAGCGCU |
| 2001 | GCGCUGGUCCGCUGAGACG | 5025 | CGUCUCAGCGGACCAGCGC |
| 2019 | GCCGCACAAGCCGCAGUUC | 5043 | GAACUGCGGCUUGUGCGGC |
| 2020 | CCGCACAAGCCGCAGUUCA | 5044 | UGAACUGCGGCUUGUGCGG |
| 2023 | CACAAGCCGCAGUUCACGU | 5047 | ACGUGAACUGCGGCUUGUG |
| 2024 | ACAAGCCGCAGUUCACGUU | 5048 | AACGUGAACUGCGGCUUGU |
| 2025 | CAAGCCGCAGUUCACGUUU | 5049 | AAACGUGAACUGCGGCUUG |
| 2027 | AGCCGCAGUUCACGUUUAC | 5051 | GUAAACGUGAACUGCGGCU |
| 2029 | CCGCAGUUCACGUUUACCU | 5053 | AGGUAAACGUGAACUGCGG |
| 2083 | CGGAACCCAGAUGGGGAUA | 5107 | UAUCCCCAUCUGGGUUCCG |
| 2084 | GGAACCCAGAUGGGGAUAG | 5108 | CUAUCCCCAUCUGGGUUCC |
| 2087 | ACCCAGAUGGGGAUAGCCA | 5111 | UGGCUAUCCCCAUCUGGGU |
| 2090 | CAGAUGGGGAUAGCCAUGG | 5114 | CCAUGGCUAUCCCCAUCUG |
| 2139 | CCCAUUCGACUACUGUGCC | 5163 | GGCACAGUAGUCGAAUGGG |
| 2140 | CCAUUCGACUACUGUGCCC | 5164 | GGGCACAGUAGUCGAAUGG |
| 2141 | CAUUCGACUACUGUGCCCU | 5165 | AGGGCACAGUAGUCGAAUG |
| 2145 | CGACUACUGUGCCCUGCGA | 5169 | UCGCAGGGCACAGUAGUCG |
| 2146 | GACUACUGUGCCCUGCGAC | 5170 | GUCGCAGGGCACAGUAGUC |
| 2159 | UGCGACGCUGCGCUGAUGA | 5183 | UCAUCAGCGCAGCGUCGCA |
| 2160 | GCGACGCUGCGCUGAUGAC | 5184 | GUCAUCAGCGCAGCGUCGC |
| 2161 | CGACGCUGCGCUGAUGACC | 5185 | GGUCAUCAGCGCAGCGUCG |
| 2162 | GACGCUGCGCUGAUGACCA | 5186 | UGGUCAUCAGCGCAGCGUC |
| 2172 | UGAUGACCAGCCGCCAUCA | 5196 | UGAUGGCGGCUGGUCAUCA |
| 2175 | UGACCAGCCGCCAUCAAUC | 5199 | GAUUGAUGGCGGCUGGUCA |
| 2181 | GCCGCCAUCAAUCCUGGAC | 5205 | GUCCAGGAUUGAUGGCGGC |
| 2183 | CGCCAUCAAUCCUGGACCC | 5207 | GGGUCCAGGAUUGAUGGCG |
| 2228 | GUGGCAAGAGGGUGGAUCG | 5252 | CGAUCCACCCUCUUGCCAC |
| 2310 | AGUCAGCUUGCGGAAUCGG | 5334 | CCGAUUCCGCAAGCUGACU |
| 2371 | UGGAUACUGACUGCCCGGC | 5395 | GCCGGGCAGUCAGUAUCCA |
| 2372 | GGAUACUGACUGCCCGGCA | 5396 | UGCCGGGCAGUCAGUAUCC |
| 2374 | AUACUGACUGCCCGGCAGU | 5398 | ACUGCCGGGCAGUCAGUAU |
| 2421 | GGGCUAUGAGGUAUGGUUG | 5445 | CAACCAUACCUCAUAGCCC |
| 2479 | CUACAGCGGGUCCCAGUAG | 5503 | CUACUGGGACCCGCUGUAG |
| 2480 | UACAGCGGGUCCCAGUAGC | 5504 | GCUACUGGGACCCGCUGUA |
| 2481 | ACAGCGGGUCCCAGUAGCC | 5505 | GGCUACUGGGACCCGCUGU |
| 2484 | GCGGGUCCCAGUAGCCAAG | 5508 | CUUGGCUACUGGGACCCGC |
| 2517 | CUCAGGCUCCCAGCUUGUC | 5541 | GACAAGCUGGGAGCCUGAG |
| 2667 | UAAUGACACAGUCCUAAAU | 5691 | AUUUAGGACUGUGUCAUUA |
| 2673 | CACAGUCCUAAAUGUGGCC | 5697 | GGCCACAUUUAGGACUGUG |
| 2707 | UCCAACCAGGAGUGUAACA | 5731 | UGUUACACUCCUGGUUGGA |
| 2709 | CAACCAGGAGUGUAACAUC | 5733 | GAUGUUACACUCCUGGUUG |
| 2725 | AUCAAGCACCGAGGACGUG | 5749 | CACGUCCUCGGUGCUUGAU |
| 2857 | AUUAUAAUCCCCAACCGAG | 5881 | CUCGGUUGGGGAUUAUAAU |
| 2859 | UAUAAUCCCCAACCGAGUA | 5883 | UACUCGGUUGGGGAUUAUA |
| 2902 | GUCUUCACGCGUGUCUCUG | 5926 | CAGAGACACGCGUGAAGAC |
| 2907 | CACGCGUGUCUCUGUGUUU | 5931 | AAACACAGAGACACGCGUG |
| 2998 | AACUUCUUGUCAGACAUAA | 6022 | UUAUGUCUGACAAGAAGUU |

[0298] The siRNAs in subset E have the following characteristics:
[0299] Cross-reactivity: With 19mer in human MST1 mRNA, with 17mer/19mer in NHP MST1
[0300] Specificity category: For human and NHP: AS2 or better, SS3 or better
[0301] miRNA seeds: AS+SS strand: seed region not conserved in human, mouse, and rat and not present in >4 species. AS+SS strand: seed region not identical to seed region of known human miRNA
[0302] Off-target frequency: <15 human off-targets matched with 2 mismatches by antisense strand
[0303] SNPs: siRNA target sites do not harbor SNPs with a MAF ≥1% (pos. 2-18)

[0304] Subset F includes 38 siRNAs. The siRNAs in subset F include siRNAs from subset A and are included in Table 8. In some cases, the sense strand of any of the siRNAs of subset F comprises modification pattern 6S (Table 9). In some cases, the antisense strand of any of the siRNAs of subset F comprises modification pattern 7AS (Table 9). In some cases, the sense strand of any of the siRNAs of subset F contains an alternative modification pattern (Table 10). In some cases, the antisense strand of any of the siRNAs of subset F comprises modification pattern 7AS (Table 10). The siRNAs in subset F may comprise any other modification pattern(s). In Table 9 and Table 10, Nf (e.g. Af, Cf, Gf, Tf, or Uf) is a 2′ fluoro-modified nucleoside, n (e.g. a, c, g, t, or u) is a 2′ O-methyl modified nucleoside, and “s” is a phosphorothioate linkage.

TABLE 8
Sequences in siRNA subset F

| SEQ | | SEQ | |
|---|---|---|---|
| ID | sense strand | ID | antisense strand |
| NO: | sequence (5′-3′) | NO: | sequence (5′-3′) |
| 424 | AGCUGGGGCAAGUAAUUUU | 3448 | AAAAUUACUUGCCCCAGCU |
| 474 | AAAAGUUUAAUGUCACCCA | 3498 | UGGGUGACAUUAAACUUUU |
| 480 | UUAAUGUCACCCAGGGGCU | 3504 | AGCCCCUGGGUGACAUUAA |
| 587 | UCAAGUGUCCCCACCAAAC | 3611 | GUUUGGUGGGGACACUUGA |
| 597 | CCACCAAACCUUCCUAACA | 3621 | UGUUAGGAAGGUUUGGUGG |
| 598 | CACCAAACCUUCCUAACAC | 3622 | GUGUUAGGAAGGUUUGGUG |
| 639 | CCCUUGCAACUGACCUAUG | 3663 | CAUAGGUCAGUUGCAAGGG |
| 642 | UUGCAACUGACCUAUGGGA | 3666 | UCCCAUAGGUCAGUUGCAA |
| 643 | UGCAACUGACCUAUGGGAC | 3667 | GUCCCAUAGGUCAGUUGCA |
| 751 | AAUCCCGUAGGGACAGGUU | 3775 | AACCUGUCCCUACGGGAUU |
| 1162 | AACAAUGGGGUUGGGUACC | 4186 | GGUACCCAACCCCAUUGUU |
| 1533 | CGACAACUAUUGCCGGAAU | 4557 | AUUCCGGCAAUAGUUGUCG |
| 1534 | GACAACUAUUGCCGGAAUC | 4558 | GAUUCCGGCAAUAGUUGUC |
| 1579 | UACACUACGGAUCCGCAGA | 4603 | UCUGCGGAUCCGUAGUGUA |
| 1597 | AUCGAGCGAGAGUUCUGUG | 4621 | CACAGAACUCUCGCUCGAU |
| 2025 | CAAGCCGCAGUUCACGUUU | 5049 | AAACGUGAACUGCGGCUUG |
| 2026 | AAGCCGCAGUUCACGUUUA | 5050 | UAAACGUGAACUGCGGCUU |
| 2027 | AGCCGCAGUUCACGUUUAC | 5051 | GUAAACGUGAACUGCGGCU |
| 2307 | GACAGUCAGCUUGCGGAAU | 5331 | AUUCCGCAAGCUGACUGUC |
| 2308 | ACAGUCAGCUUGCGGAAUC | 5332 | GAUUCCGCAAGCUGACUGU |
| 2420 | CGGGCUAUGAGGUAUGGUU | 5444 | AACCAUACCUCAUAGCCCG |
| 2421 | GGGCUAUGAGGUAUGGUUG | 5445 | CAACCAUACCUCAUAGCCC |
| 2596 | CCUGAAUGGUAUGUGGUGC | 5620 | GCACCACAUACCAUUCAGG |
| 2666 | GUAAUGACACAGUCCUAAA | 5690 | UUUAGGACUGUGUCAUUAC |
| 2667 | UAAUGACACAGUCCUAAAU | 5691 | AUUUAGGACUGUGUCAUUA |
| 2673 | CACAGUCCUAAAUGUGGCC | 5697 | GGCCACAUUUAGGACUGUG |
| 2675 | CAGUCCUAAAUGUGGCCUU | 5699 | AAGGCCACAUUUAGGACUG |
| 2707 | UCCAACCAGGAGUGUAACA | 5731 | UGUUACACUCCUGGUUGGA |
| 2709 | CAACCAGGAGUGUAACAUC | 5733 | GAUGUUACACUCCUGGUUG |
| 2712 | CCAGGAGUGUAACAUCAAG | 5736 | CUUGAUGUUACACUCCUGG |
| 2716 | GAGUGUAACAUCAAGCACC | 5740 | GGUGCUUGAUGUUACACUC |
| 2820 | UGCCUGCUUUACCCACAAC | 5844 | GUUGUGGGUAAAGCAGGCA |
| 2844 | GGUCCUGGAAGGAAUUAUA | 5868 | UAUAAUUCCUUCCAGGACC |
| 2859 | UAUAAUCCCCAACCGAGUA | 5883 | UACUCGGUUGGGGAUUAUA |
| 2903 | UCUUCACGCGUGUCUCUGU | 5927 | ACAGAGACACGCGUGAAGA |
| 2907 | CACGCGUGUCUCUGUGUUU | 5931 | AAACACAGAGACACGCGUG |
| 2998 | AACUUCUUGUCAGACAUAA | 6022 | UUAUGUCUGACAAGAAGUU |
| 3000 | CUUCUUGUCAGACAUAAAG | 6024 | CUUUAUGUCUGACAAGAAG |

TABLE 9
Modified siRNA subset F sequences

| SEQ ID | sense strand sequence | SEQ ID | antisense strand sequence |
|---|---|---|---|
| NO: | (5′-3′) | NO: | (5′-3′) |
| 6049 | AfsgsCfuGfgGfgCfaAfgUfaAf | 6087 | usAfsaAfuUfaCfuUfgCfcCfcA |
| | uUfuAfsusu | | fgCfususu |
| 6050 | AfsasAfaGfuUfuAfaUfgUfcAf | 6088 | usGfsgGfuGfaCfaUfuAfaAfcU |
| | cCfcAfsusu | | fuUfususu |
| 6051 | UfsusAfaUfgUfcAfcCfcAfgGf | 6089 | usGfscCfcCfuGfgGfuGfaCfaU |
| | gGfcAfsusu | | fuAfasusu |
| 6052 | UfscsAfaGfuGfuCfcCfcAfcCf | 6090 | usUfsuUfgGfuGfgGfgAfcAfcU |
| | aAfaAfsusu | | fuGfasusu |
| 6053 | CfscsAfcCfaAfaCfcUfuCfcUf | 6091 | usGfsuUfaGfgAfaGfgUfuUfgG |
| | aAfcAfsusu | | fuGfgsusu |
| 6054 | CfsasCfcAfaAfcCfuUfcCfuAf | 6092 | usUfsgUfuAfgGfaAfgGfuUfuG |
| | aCfaAfsusu | | fgUfgsusu |
| 6055 | CfscsCfuUfgCfaAfcUfgAfcCf | 6093 | usAfsuAfgGfuCfaGfuUfgCfaA |
| | uAfuAfsusu | | fgGfgsusu |
| 6056 | UfsusGfcAfaCfuGfaCfcUfaUf | 6094 | usCfscCfaUfaGfgUfcAfgUfuG |
| | gGfgAfsusu | | fcAfasusu |
| 6057 | UfsgsCfaAfcUfgAfcCfuAfuGf | 6095 | usUfscCfcAfuAfgGfuCfaGfuU |
| | gGfaAfsusu | | fgCfasusu |
| 6058 | AfsasUfcCfcGfuAfgGfgAfcAf | 6096 | usAfscCfuGfuCfcCfuAfcGfgG |
| | gGfuAfsusu | | faUfususu |
| 6059 | AfsasCfaAfuGfgGfgUfuGfgGf | 6097 | usGfsuAfcCfcAfaCfcCfcAfuU |
| | uAfcAfsusu | | fgUfususu |
| 6060 | CfsgsAfcAfaCfuAfuUfgCfcGf | 6098 | usUfsuCfcGfgCfaAfuAfgUfuG |
| | gAfaAfsusu | | fuCfgsusu |
| 6061 | GfsasCfaAfcUfaUfuGfcCfgGf | 6099 | usAfsuUfcCfgGfcAfaUfaGfuU |
| | aAfuAfsusu | | fgUfcsusu |
| 6062 | UfsasCfaCfuAfcGfgAfuCfcGf | 6100 | usCfsuGfcGfgAfuCfcGfuAfgU |
| | cAfgAfsusu | | fgUfasusu |
| 6063 | AfsusCfgAfgCfgAfgAfgUfuCf | 6101 | usAfscAfgAfaCfuCfuCfgCfuC |
| | uGfuAfsusu | | fgAfususu |
| 6064 | CfsasAfgCfcGfcAfgUfuCfaCf | 6102 | usAfsaCfgUfgAfaCfuGfcGfgC |
| | gUfuAfsusu | | fuUfgsusu |
| 6065 | AfsasGfcCfgCfaGfuUfcAfcGf | 6103 | usAfsaAfcGfuGfaAfcUfgCfgG |
| | uUfuAfsusu | | fcUfususu |
| 6066 | AfsgsCfcGfcAfgUfuCfaCfgUf | 6104 | usUfsaAfaCfgUfgAfaCfuGfcG |
| | uUfaAfsusu | | fgCfususu |
| 6067 | GfsasCfaGfuCfaGfcUfuGfcGf | 6105 | usUfsuCfcGfcAfaGfcUfgAfcU |
| | gAfaAfsusu | | fgUfcsusu |
| 6068 | AfscsAfgUfcAfgCfuUfgCfgGf | 6106 | usAfsuUfcCfgCfaAfgCfuGfaC |
| | aAfuAfsusu | | fuGfususu |
| 6069 | CfsgsGfgCfuAfuGfaGfgUfaUf | 6107 | usAfscCfaUfaCfcUfcAfuAfgC |
| | gGfuAfsusu | | fcCfgsusu |
| 6070 | GfsgsGfcUfaUfgAfgGfuAfuGf | 6108 | usAfsaCfcAfuAfcCfuCfaUfaG |
| | gUfuAfsusu | | fcCfcsusu |
| 6071 | CfscsUfgAfaUfgGfuAfuGfuGf | 6109 | usCfsaCfcAfcAfuAfcCfaUfuC |
| | gUfgAfsusu | | faGfgsusu |
| 6072 | GfsusAfaUfgAfcAfcAfgUfcCf | 6110 | usUfsuAfgGfaCfuGfuGfuCfaU |
| | uAfaAfsusu | | fuAfcsusu |
| 6073 | UfsasAfuGfaCfaCfaGfuCfcUf | 6111 | usUfsuUfaGfgAfcUfgUfgUfcA |
| | aAfaAfsusu | | fuUfasusu |
| 6074 | CfsasCfaGfuCfcUfaAfaUfgUf | 6112 | usGfscCfaCfaUfuUfaGfgAfcU |
| | gGfcAfsusu | | fgUfgsusu |
| 6075 | CfsasGfuCfcUfaAfaUfgUfgGf | 6113 | usAfsgGfcCfaCfaUfuUfaGfgA |
| | cCfuAfsusu | | fcUfgsusu |
| 6076 | UfscsCfaAfcCfaGfgAfgUfgUf | 6114 | usGfsuUfaCfaCfuCfcUfgGfuU |
| | aAfcAfsusu | | fgGfasusu |
| 6077 | CfsasAfcCfaGfgAfgUfgUfaAf | 6115 | usAfsuGfuUfaCfaCfuCfcUfgG |
| | CAfuAfsusu | | fuUfgsusu |
| 6078 | CfscsAfgGfaGfuGfuAfaCfaUf | 6116 | usUfsuGfaUfgUfuAfcAfcUfcC |
| | cAfaAfsusu | | fuGfgsusu |
| 6079 | GfsasGfuGfuAfaCfaUfcAfaGf | 6117 | usGfsuGfcUfuGfaUfgUfuAfcA |
| | CAfcAfsusu | | fcUfcsusu |
| 6080 | UfsgsCfcUfgCfuUfuAfcCfcAf | 6118 | usUfsuGfuGfgGfuAfaAfgCfaG |
| | cAfaAfsusu | | fgCfasusu |
| 6081 | GfsgsUfcCfuGfgAfaGfgAfaUf | 6119 | usAfsuAfaUfuCfcUfuCfcAfgG |
| | uAfuAfsusu | | faCfcsusu |
| 6082 | UfsasUfaAfuCfcCfcAfaCfcGf | 6120 | usAfscUfcGfgUfuGfgGfgAfuU |
| | aGfuAfsusu | | faUfasusu |
| 6083 | UfscsUfuCfaCfgCfgUfgUfcUf | 6121 | usCfsaGfaGfaCfaCfgCfgUfgA |
| | cUfgAfsusu | | faGfasusu |
| 6084 | CfsasCfgCfgUfgUfcUfcUfgUf | 6122 | usAfsaCfaCfaGfaGfaCfaCfgC |
| | gUfuAfsusu | | fgUfgsusu |
| 6085 | AfsasCfuUfcUfuGfuCfaGfaCf | 6123 | usUfsaUfgUfcUfgAfcAfaGfaA |
| | aUfaAfsusu | | fgUfususu |
| 6086 | CfsusUfcUfuGfuCfaGfaCfaUf | 6124 | usUfsuUfaUfgUfcUfgAfcAfaG |
| | aAfaAfsusu | | faAfgsusu |

TABLE 10
Alternatively modified siRNA subset F sequences

| siRNA | SEQ ID | sense strand sequence | SEQ ID | antisense strand sequence |
|---|---|---|---|---|
| Name | NO: | (5′-3′) | NO: | (5′-3′) |
| ETD01274 | 6125 | asgscuggggCfaaguaauuua | 6087 | usAfsaAfuUfaCfuUfgCfcCfcA |
| | | susu | | fgCfususu |
| ETD01275 | 6126 | asasaaGfuuuAfAfugucacc | 6088 | usGfsgGfuGfaCfaUfuAfaAfcU |
| | | casusu | | fuUfususu |
| ETD01276 | 6127 | ususaauGfucAfcccaggggc | 6089 | usGfscCfcCfuGfgGfuGfaCfaU |
| | | asusu | | fuAfasusu |
| ETD01277 | 6128 | uscsaaguguCfcCfcaccaaa | 6090 | usUfsuUfgGfuGfgGfgAfcAfcU |
| | | asusu | | fuGfasusu |
| ETD01278 | 6129 | cscsacCfaaaCfCfuuccuaa | 6091 | usGfsuUfaGfgAfaGfgUfuUfgG |
| | | casusu | | fuGfgsusu |
| ETD01279 | 6130 | csasccaaaCfCfuUfccuaac | 6092 | usUfsgUfuAfgGfaAfgGfuUfuG |
| | | aasusu | | fgUfgsusu |
| ETD01280 | 6131 | cscscuuGfcAfAfcugaccua | 6093 | usAfsuAfgGfuCfaGfuUfgCfaA |
| | | uasusu | | fgGfgsusu |
| ETD01281 | 6132 | ususgcAfAfcuGfAfccuaug | 6094 | usCfscCfaUfaGfgUfcAfgUfuG |
| | | ggasusu | | fcAfasusu |
| ETD01282 | 6133 | usgscaAfcuGfAfccuauggg | 6095 | usUfscCfcAfuAfgGfuCfaGfuU |
| | | aasusu | | fgCfasusu |
| ETD01283 | 6134 | asasucccGfuAfgGfgacagg | 6096 | usAfscCfuGfuCfcCfuAfcGfgG |
| | | uasusu | | faUfususu |
| ETD01284 | 6135 | asascaauGfGfGfGfuugggu | 6097 | usGfsuAfcCfcAfaCfcCfcAfuU |
| | | acasusu | | fgUfususu |
| ETD01285 | 6136 | csgsacAfAfcuAfuugccgga | 6098 | usUfsuCfcGfgCfaAfuAfgUfuG |
| | | aasusu | | fuCfgsusu |
| ETD01286 | 6137 | gsascaacUfaUfUfgccggaa | 6099 | usAfsuUfcCfgGfcAfaUfaGfuU |
| | | uasusu | | fgUfcsusu |
| ETD01287 | 6138 | usascacuAfcGfGfauccgca | 6100 | usCfsuGfcGfgAfuCfcGfuAfgU |
| | | gasusu | | fgUfasusu |
| ETD01288 | 6139 | asuscgAfgcgAfgAfguucug | 6101 | usAfscAfgAfaCfuCfuCfgCfuC |
| | | uasusu | | fgAfususu |
| ETD01289 | 6140 | csasagccGfcAfGfuucacgu | 6102 | usAfsaCfgUfgAfaCfuGfcGfgC |
| | | uasusu | | fuUfgsusu |
| ETD01290 | 6141 | asasgccGfcAfGfuucacguu | 6103 | usAfsaAfcGfuGfaAfcUfgCfgG |
| | | uasusu | | fcUfususu |
| ETD01291 | 6142 | asgsccgCfagUfUfcacguuu | 6104 | usUfsaAfaCfgUfgAfaCfuGfcG |
| | | aasusu | | fgCfususu |
| ETD01292 | 6143 | gsascaGfucAfGfcuugcgga | 6105 | usUfsuCfcGfcAfaGfcUfgAfcU |
| | | aasusu | | fgUfcsusu |
| ETD01293 | 6144 | ascsagUfCfagCfuUfgcgga | 6106 | usAfsuUfcCfgCfaAfgCfuGfaC |
| | | auasusu | | fuGfususu |
| ETD01294 | 6145 | csgsggcuAfuGfaGfguaugg | 6107 | usAfscCfaUfaCfcUfcAfuAfgC |
| | | uasusu | | fcCfgsusu |
| ETD01295 | 6146 | gsgsgcuAfuGfAfGfGfuaug | 6108 | usAfsaCfcAfuAfcCfuCfaUfaG |
| | | guuasusu | | fcCfcsusu |
| ETD01296 | 6147 | cscsugAfAfuGfGfuAfugug | 6109 | usCfsaCfcAfcAfuAfcCfaUfuC |
| | | gugasusu | | faGfgsusu |
| ETD01297 | 6148 | gsusaaugAfcAfcAfguccua | 6110 | usUfsuAfgGfaCfuGfuGfuCfaU |
| | | aasusu | | fuAfcsusu |
| ETD01298 | 6149 | usasaugaCfaCfaguccuaaa | 6111 | usUfsuUfaGfgAfcUfgUfgUfcA |
| | | asusu | | fuUfasusu |
| ETD01299 | 6150 | csascagUfCfCfUfaaaugug | 6112 | usGfscCfaCfaUfuUfaGfgAfcU |
| | | gcasusu | | fgUfgsusu |
| ETD01300 | 6151 | csasguccuAfAfauguggccu | 6113 | usAfsgGfcCfaCfaUfuUfaGfgA |
| | | asusu | | fcUfgsusu |
| ETD01301 | 6152 | uscscaAfccAfGfGfAfgugu | 6114 | usGfsuUfaCfaCfuCfcUfgGfuU |
| | | aacasusu | | fgGfasusu |
| ETD01302 | 6153 | csasaccAfGfGfAfGfuguaa | 6115 | usAfsuGfuUfaCfaCfuCfcUfgG |
| | | cauasusu | | fuUfgsusu |
| ETD01303 | 6154 | cscsagGfaGfuGfuaacauca | 6116 | usUfsuGfaUfgUfuAfcAfcUfcC |
| | | aasusu | | fuGfgsusu |
| ETD01304 | 6155 | gsasgugUfaaCfaUfcaagca | 6117 | usGfsuGfcUfuGfaUfgUfuAfcA |
| | | casusu | | fcUfcsusu |
| ETD01305 | 6156 | usgsccUfgcUfUfuacccaca | 6118 | usUfsuGfuGfgGfuAfaAfgCfaG |
| | | aasusu | | fgCfasusu |
| ETD01306 | 6157 | gsgsuccuGfGfAfAfGfgaau | 6119 | usAfsuAfaUfuCfcUfuCfcAfgG |
| | | uauasusu | | faCfcsusu |
| ETD01307 | 6158 | usasuaauCfCfCfCfaaccga | 6120 | usAfscUfcGfgUfuGfgGfgAfuU |
| | | guasusu | | faUfasusu |
| ETD01308 | 6159 | uscsuuCfaCfgCfgugucucu | 6121 | usCfsaGfaGfaCfaCfgCfgUfgA |
| | | gasusu | | faGfasusu |
| ETD01309 | 6160 | csascgcgUfgUfcUfcugugu | 6122 | usAfsaCfaCfaGfaGfaCfaCfgC |
| | | uasusu | | fgUfgsusu |
| ETD01310 | 6161 | asascuucuuGfucagacauaa | 6123 | usUfsaUfgUfcUfgAfcAfaGfaA |
| | | susu | | fgUfususu |
| ETD01311 | 6162 | csusucUfUfgUfCfagacaua | 6124 | usUfsuUfaUfgUfcUfgAfcAfaG |
| | | aaasusu | | faAfgsusu |

[0305] Any siRNA among any of subsets A-H may comprise any modification pattern described herein. If a sequence is a different number of nucleotides in length than a modification pattern, the modification pattern may still be used with the appropriate number of additional nucleotides added 5′ or 3′ to match the number of nucleotides in the modification pattern. For example, if a sense or antisense strand of the siRNA among any of subsets A-F comprises 19 nucleotides, and a modification pattern comprises 21 nucleotides, UU may be added onto the 5′ end of the sense or antisense strand.

### Example 3: Screening MST1 siRNAs for Activity in Human Cells in Culture

[0306] Chemically modified MST1 siRNAs cross reactive for human and non-human primate and derived from sequences in siRNA subset F (Table 8) and shown in Table 10 were assayed for MST1 mRNA knockdown activity in cells in culture. Hep 3B2.1-7 cells (ATCC® HB-8064™) were seeded in 96-well tissue culture plates at a cell density of 7,500 cells per well in EMEM (ATCC Catalog No. 30-2003) supplemented with 10% fetal bovine serum and incubated overnight in a water-jacketed, humidified incubator at 37° C. in an atmosphere composed of air plus 5% carbon dioxide. The MST1 siRNAs were individually transfected into Hep 3B2.1-7 cells in duplicate wells at 10 nM final concentration using 0.15 μL Lipofectamine RNAiMax (Fisher) per well. Silencer Select Negative Control #1 (ThermoFisher, Catalog #4390843) was transfected at 10 nM final concentration as a control. Silencer Select human MST1 (ThermoFisher, Catalog #4427037, ID: s8994)) was transfected at 10 nM final concentration and used as a positive control. After incubation for 48 hours at 37° C., total RNA was harvested from each well and cDNA prepared using TaqMan® Fast Advanced Cells-to-CT™ Kit (ThermoFisher, Catalog #A35374) according to the manufacturer's instructions. The level of MST1 mRNA from each well was measured in triplicate by real-time qPCR on a QuantStudio™ 6 Pro Real-Time PCR System using TaqMan Gene Expression Assay for human MST1 (ThermoFisher, assay #Hs00360684_ml). The level of PPIA mRNA was measured using TaqMan Gene Expression Assay (ThermoFisher, assay #Hs99999904_ml) and used to determine relative MST1 mRNA levels in each well using the delta-delta Ct method. All data was normalized to relative MS™ mRNA levels in untreated Hep 3B2.1-7 cells. The results are shown in Table 11. The siRNAs ETD01290, ETD01274, ETD01298, ETD01299, ETD01296, ETD01297, ETD01281, ETD01303, ETD01308, ETD01289, ETD01302, ETD01305 and ETD01306 reduced MST1 levels by greater than 50% when transfected at 10 nM.

TABLE 11
Knockdown Activity of MST1-Specific siRNAs
at 1 nM ad 10 nM in Human ARPE-19 Cells

| | Relative MST1 mRNA Level | |
|---|---|---|
| siRNA name | 1.00 | |
| Untreated Cells | 1 nM siRNA | 10 nM siRNA |
| Negative Control siRNA | 0.77 | 0.52 |
| Positive Control siRNA | 0.28 | 0.12 |
| ETD01274 | 0.46 | 0.47 |
| ETD01275 | 0.60 | 0.69 |
| ETD01276 | 0.91 | 0.70 |
| ETD01277 | 0.89 | 0.85 |
| ETD01278 | 1.04 | 0.84 |
| ETD01279 | 1.26 | 1.19 |
| ETD01280 | 0.76 | 0.79 |
| ETD01281 | 0.46 | 0.39 |
| ETD01282 | 0.63 | 0.69 |
| ETD01283 | 1.22 | 1.37 |
| ETD01284 | 1.11 | 0.98 |
| ETD01285 | 0.99 | 0.92 |
| ETD01286 | 0.95 | 0.65 |
| ETD01287 | 1.18 | 1.65 |
| ETD01288 | 0.79 | 0.75 |
| ETD01289 | 0.45 | 0.32 |
| ETD01290 | 0.40 | 0.50 |
| ETD01291 | 1.25 | 0.96 |
| ETD01292 | 0.96 | 0.81 |
| ETD01293 | 1.17 | 1.02 |
| ETD01294 | 0.91 | 0.76 |
| ETD01295 | 1.11 | 1.08 |
| ETD01296 | 0.69 | 0.43 |
| ETD01297 | 0.42 | 0.43 |
| ETD01298 | 0.39 | 0.45 |
| ETD01299 | 0.74 | 0.45 |
| ETD01300 | 1.23 | 0.90 |
| ETD01301 | 1.11 | 1.01 |
| ETD01302 | 0.75 | 0.31 |
| ETD01303 | 0.75 | 0.39 |
| ETD01304 | 1.16 | 0.88 |
| ETD01305 | 0.40 | 0.30 |
| ETD01306 | 0.27 | 0.20 |
| ETD01307 | 0.90 | 0.96 |
| ETD01308 | 0.39 | 0.37 |
| ETD01309 | 0.73 | 0.53 |
| ETD01310 | 0.78 | 0.65 |
| ETD01311 | 0.71 | 0.64 |

### Example 4: Determining the IC50 of MST1 siRNAs

[0307] The IC50 values for knockdown of MST1 mRNA by select MST1 siRNAs will be determined in Hep 3B2.1-7 cells (ATCC® HB-8064™) cells. The siRNAs will be assayed individually at 30 nM, 10 nM, 3 nM, 1 nM and 0.3 nM, or 3 nM, 1 nM, 0.3 nM, 0.1 nM and 0.03 nM, or 30 nM, 10 nM, 3 nM, 1 nM, 0.3 nM, 0.1 nM and 0.03 nM. The HepG2 cells will be seeded in 96-well tissue culture plates at a cell density of 7,500 cells per well in EMEM (ATCC Catalog No. 30-2003) supplemented with 10% fetal bovine serum and incubated overnight in a water-jacketed, humidified incubator at 37° C. in an atmosphere composed of air plus 5% carbon dioxide. The MST1 siRNAs will be individually transfected into HepG2 cells in triplicate wells using 0.15 μL Lipofectamine RNAiMax (Fisher) per well. After incubation for 48 hours at 37° C., total RNA will be harvested from each well and cDNA prepared using TaqMan® Fast Advanced Cells-to-CT™ Kit (ThermoFisher, Catalog #A35374) according to the manufacturer's instructions. The level of MST1 mRNA from each well will be measured in triplicate by real-time qPCR on a QuantStudio™ 6 Pro Real-Time PCR System using TaqMan Gene Expression Assay for human MST1 (ThermoFisher, assay #Hs00360684_ml). The level of PPIA mRNA will be measured using TaqMan Gene Expression Assay (ThermoFisher, assay #Hs99999904 ml) and used to determine relative MST1 mRNA levels in each well using the delta-delta Ct method. All data will be normalized to relative MST1 mRNA levels in untreated HepG2 cells. Curve fit will be accomplish using the [inhibitor] vs. response (three parameters) function in GraphPad Prism software.

### Example 5: siRNA-Mediated Knockdown of MST1 in Hep 3B2.1-7 Cell Line

[0308] siRNAs targeting MST1 mRNA may downregulate levels of MST1 mRNA and MSP, leading to a decrease in MSP secretion, when administered to the cultured human hepatocyte cell line, Hep 3B2.1-7 cells (ATCC® HB-8064™). Accordingly, these results will demonstrate that siRNAs targeting MST1 mRNA in vivo will also downregulate levels of MST1 mRNA and MSP, leading to a decrease in MSP secretion into the bloodstream. The accompanying decrease in circulating MSP levels may improve lung conditions, particularly in subjects with lung disorders.

[0309] On Day 0, Hep 3B2.1-7 cells are to be seeded at 150,000 cells/mL into a Falcon 24-well tissue culture plate (ThermoFisher Cat. No. 353047) at 0.5 mL per well.

[0310] On Day 1, MST1 siRNA and negative control siRNA master mixes are prepared. The MST1 siRNA master mix contains 350 μL of Opti-MEM (ThermoFisher Cat. No. 4427037—s1288 Lot No. AS02B02D) and 3.5 μL of a mixture of the two MST1 siRNAs (10 μM stock). The negative control siRNA master mix contains 350 μL of Opti-MEM and 3.5 μL of negative control siRNA (ThermoFisher Cat. No. 4390843, 10 μM stock). Next, 3 μL of TransIT-X2 (Mirus Cat. No. MIR-6000) is added to each master mix. The mixes are incubated for 15 minutes to allow transfection complexes to form, then 51 μL of the appropriate master mix+TransIT-X2 is added to duplicate wells of HEPG2 cells with a final siRNA concentration of 10 nM.

[0311] On Day 3, 48 hours post transfection, media is collected and mixed with protein lysis buffer containing protease and phosphatase inhibitors, and the cells are lysed using the Cells-to-Ct kit according to the manufacturer's protocol (ThermoFisher Cat. No. 4399002). For the Cells-to-Ct, cells are washed with 50 μL using cold 1×PBS and lysed by adding 49.5 μL of Lysis Solution and 0.5 μL DNase I per well and pipetting up and down 5 times and incubating for 5 minutes at room temperature. The Stop Solution (5 μL/well) is added to each well and mixed by pipetting up and down five times and incubating at room temperature for 2 minutes. The reverse transcriptase reaction is performed using 22.5 μL of the lysate according to the manufacturer's protocol. Samples are stored at −80° C. until real-time qPCR is performed in triplicate using TaqMan Gene Expression Assays (Applied Biosystems FAM/MST1 using a BioRad CFX96 Cat. No. 1855195). For the protein quantification, equivalent quantities (30-50 μg) of protein are separated by 10% SDS polyacrylamide gels and transferred to polyvinylidene fluoride membranes. Membranes are blocked with 5% nonfat milk and incubated overnight with the appropriate primary antibody at dilutions specified by the manufacturer. Next, the membranes are washed three times in TBST and incubated with the corresponding horseradish peroxidase conjugated secondary antibody at 1:5000 dilution for 1 hr. Bound secondary antibody is detected using an enhanced chemiluminescence system. The primary immunoblotting antibody is an anti-MSP antibody (Abcam, Cambridge, UK).

[0312] A decrease in MST1 mRNA and MSP expression in the Hep 3B2.1-7 cells is expected after transfection with the MST1 siRNAs compared to MST1 mRNA and MSP levels in HEPG2 cells transfected with the non-specific control siRNA 48 hours after transfection. There is an expected decrease in the amount of MST1 mRNA and secreted MSP, measured by quantifying the amount of MST1 mRNA and MSP in media of Hep 3B2.1-7 cells transfected with the MST1 siRNAs relative to the amount of MST1 mRNA and MSP in media of Hep 3B2.1-7 cells transfected with a non-specific control siRNA 48 hours after transfection. These results are expected to show that the MST1 siRNAs elicit knockdown of MST1 mRNA in Hep 3B2.1-7 cells and that the decrease in MST1 expression may correspond with a decrease in MST1 mRNA and MSP secretion.

### Example 6: ASO-Mediated Knockdown of MST1 in Hep 3B2.1-7 Cell Line

[0313] ASOs targeting MST1 mRNA may downregulate levels of MST1 mRNA and MSP, leading to a decrease in MSP secretion, when administered to the cultured human hepatocyte cell line, Hep 3B2.1-7. Accordingly, these results will demonstrate that siRNAs targeting MST1 mRNA in vivo will also downregulate levels of MST1 mRNA and MSP, leading to a decrease in MSP secretion into the bloodstream. The accompanying decrease in circulating MSP levels may improve lung conditions, particularly in subjects with lung disorders.

[0314] On Day 0, Hep 3B2.1-7 cells are to be seeded at 150,000 cells/mL into a Falcon 24-well tissue culture plate (ThermoFisher Cat. No. 353047) at 0.5 mL per well.

[0315] On Day 1, MST1 ASO and negative control ASO master mixes are prepared. The MST1 ASO master mix contains 350 μL of Opti-MEM (ThermoFisher Cat. No. 4427037—s1288 Lot No. AS02B02D) and 3.5 μL of a mixture of the two MST1 ASOs (10 μM stock). The negative control ASO master mix contains 350 μL of Opti-MEM and 3.5 μL of negative control ASO (ThermoFisher Cat. No. 4390843, 10 μM stock). Next, 3 μL of TransIT-X2 (Mirus Cat. No. MIR-6000) is added to each master mix. The mixes are incubated for 15 minutes to allow transfection complexes to form, then 51 μL of the appropriate master mix+TransIT-X2 is added to duplicate wells of HEPG2 cells with a final ASO concentration of 10 nM.

[0316] On Day 3, 48 hours post transfection, media is collected and mixed with protein lysis buffer containing protease and phosphatase inhibitors, and the cells are lysed using the Cells-to-Ct kit according to the manufacturer's protocol (ThermoFisher Cat. No. 4399002). For the Cells-to-Ct, cells are washed with 50 μL using cold 1×PBS and lysed by adding 49.5 μL of Lysis Solution and 0.5 μL DNase I per well and pipetting up and down 5 times and incubating for 5 minutes at room temperature. The Stop Solution (5 μL/well) is added to each well and mixed by pipetting up and down five times and incubating at room temperature for 2 minutes. The reverse transcriptase reaction is performed using 22.5 μL of the lysate according to the manufacturer's protocol. Samples are stored at −80° C. until real-time qPCR is performed in triplicate using TaqMan Gene Expression Assays (Applied Biosystems FAM/MST1 using a BioRad CFX96 Cat. No. 1855195). For the protein quantification, equivalent quantities (30-50 μg) of protein are separated by 10% SDS polyacrylamide gels and transferred to polyvinylidene fluoride membranes. Membranes are blocked with 5% nonfat milk and incubated overnight with the appropriate primary antibody at dilutions specified by the manufacturer. Next, the membranes are washed three times in TBST and incubated with the corresponding horseradish peroxidase conjugated secondary antibody at 1:5000 dilution for 1 hr. Bound secondary antibody is detected using an enhanced chemiluminescence system. The primary immunoblotting antibody is an anti-MSP antibody (Abcam, Cambridge, UK).

[0317] A decrease in MST1 mRNA and MSP expression in the Hep 3B2.1-7 cells is expected after transfection with the MST1 ASOs compared to MST1 mRNA levels in Hep 3B2.1-7 cells transfected with the non-specific control ASO 48 hours after transfection. There is an expected decrease in the amount of MST1 mRNA and secreted MSP, measured by quantifying the amount of MST1 mRNA and MSP in media of Hep 3B2.1-7 cells transfected with the MST1 ASOs relative to the amount of MST1 mRNA and MSP in media of Hep 3B2.1-7 cells transfected with a non-specific control ASO 48 hours after transfection. These results are expected to show that the MST1 ASOs elicit knockdown of MST1 mRNA and MSP in HEPG2 cells and that the decrease in MST1 expression may correspond with a decrease in MST1 mRNA and MSP secretion.

### Example 7: Inhibition of MST1 in a Mouse Model of Lung Inflammation Via Acute Cigarette Smoke Exposure Using MST1 siRNAs or ASOs

[0318] In this experiment, a mouse model of lung inflammation induced by acute cigarette smoke exposure is used to evaluate the effect of siRNA or ASO inhibition of MST1. In this cigarette smoke induced model, mice are exposed to cigarette smoke for 3 hours which will result in a transient inflammatory response. Lung inflammation is assessed by measuring neutrophils and macrophages in bronchoalveolar lavage fluid and lung tissue.

[0319] Briefly, mice are divided into six groups: Group 1—a group treated with non-targeting control siRNA and cigarette smoke inhalation, Group 2—a group treated with non-targeting control ASO and cigarette smoke inhalation, Group 3—a group treated with MST1 siRNA1 and cigarette smoke inhalation, Group 4—a group treated with MST1 ASO1 and cigarette smoke inhalation, Group 5—a group treated with vehicle and cigarette smoke inhalation, Group 6—a group treated with vehicle and not receiving cigarette smoke stimulus. Each group contains eight mice (4 males, 4 females).

[0320] Administration of siRNA or ASO is achieved with a 200 μL subcutaneous injection of siRNA or ASO resuspended in PBS at concentration of 10 μM. At Time 0, Group 1 mice are injected subcutaneously with non-targeting control siRNA, Group 2 mice are injected subcutaneously with non-targeting control ASO, Group 3 mice are injected subcutaneously with siRNA1 targeting mouse MST1, Group 4 mice are injected subcutaneously with ASO1 targeting mouse MST1, and Group 5 and 6 mice are injected subcutaneously with vehicle.

[0321] 24 hours after the smoke inhalation treatment, bronchoalveolar lavage fluid is collected and the mice are sacrificed by cervical dislocation following an intraperitoneal injection of 0.3 ml Nembutal (5 mg/ml) (Sigma Cat. No. 1507002). Final blood samples are collected, and livers and lungs are removed, and a section placed in RNAlater for mRNA isolation.

[0322] mRNA is isolated from tissue placed in RNAlater solution using the PureLink kit according to the manufacturer's protocol (ThermoFisher Cat. No. 12183020). The reverse transcriptase reaction is performed according to the manufacturer's protocol. Samples are stored at −80° C. until real-time qPCR is performed in triplicate using TaqMan Gene Expression Assays (Applied Biosystems FAM/MST1 using a BioRad CFX96 Cat. No. 1855195). A decrease in MST1 mRNA and MSP expression in the liver tissue and circulating MSP in the blood from mice dosed with the MST1 siRNA1 or ASO1 is expected compared to MST1 mRNA or MSP expression in the liver tissue and circulating MSP in the blood from mice dosed with the non-specific controls. There is an expected decrease in neutrophil and macrophage counts in the bronchoalveolar lavage fluid in cigarette smoke exposed mice that receive the MST1 siRNA or ASO compared to the neutrophil and macrophage counts in the bronchoalveolar lavage fluid in cigarette smoke exposed mice that receive the non-specific control. These results are expected to show that the MST1 siRNA or ASO elicits knockdown of MST1 mRNA and MSP in liver tissue and reduces circulating MSP, and that the decrease in MST1 mRNA and MSP expression may correspond with a decrease in neutrophil and macrophage counts in the bronchoalveolar lavage fluid in mice exposed to cigarette smoke.

### Example 8: Inhibition of MST1 in a Mouse Model of COPD Using MST1 siRNAs or ASOs

[0323] In this experiment, a mouse model of cigarette smoke induced COPD is to be used to evaluate the effect of siRNA or ASO inhibition of MST1. In the cigarette smoke induced COPD model, mice are exposed to cigarette smoke for 6 months to mimic patients with a substantial history of cigarette smoking. Lung inflammation is assessed by measuring neutrophil and macrophage in bronchoalveolar lavage fluid and lung tissue. Lung function is also assessed by measuring tidal volume, resistance and dynamic compliance. Additionally, lung morphology and air space enlargement is assessed by fixing and staining the lungs and measuring structural parameters such as air space, septal wall thickness and mean linear intercept.

[0324] Briefly, mice are divided into six groups: Group 1—a group treated with non-targeting control siRNA and cigarette smoke inhalation, Group 2—a group treated with non-targeting control ASO and cigarette smoke inhalation, Group 3—a group treated with MST1 siRNA1 and cigarette smoke inhalation, Group 4—a group treated with MST1 ASO1 and cigarette smoke inhalation, Group 5—a group treated with vehicle and cigarette smoke inhalation, Group 6—a group treated with vehicle and not receiving cigarette smoke stimulus. Each group contains eight mice (4 males, 4 females).

[0325] Administration of siRNA or ASO is achieved with a 200 μL subcutaneous injection of siRNA or ASO resuspended in PBS at concentration of 10 μM. On Study Day 0, Group 1 mice are injected subcutaneously with non-targeting control siRNA, Group 2 mice are injected subcutaneously with non-targeting control ASO, Group 3 mice are injected subcutaneously with siRNA1 targeting mouse MST1, Group 4 mice are injected subcutaneously with ASO1 targeting mouse MST1, and Group 5 and 6 mice are injected subcutaneously with vehicle. Every 14 days after the first injection animals from each group will be dosed for a total of 12 injections.

[0326] 24 hours after the final smoke inhalation treatment, bronchoalveolar lavage fluid is collected and the mice are sacrificed by cervical dislocation following an intraperitoneal injection of 0.3 ml Nembutal (5 mg/ml) (Sigma Cat. No. 1507002). Final blood samples are collected, and livers and lungs are removed, and a section placed in RNAlater for mRNA isolation or fixed with paraformaldehyde and then embedded in paraffin for tissue sectioning.

[0327] mRNA is isolated from tissue placed in RNAlater solution using the PureLink kit according to the manufacturer's protocol (ThermoFisher Cat. No. 12183020). The reverse transcriptase reaction is performed according to the manufacturer's protocol. Samples are stored at −80° C. until real-time qPCR is performed in triplicate using TaqMan Gene Expression Assays (Applied Biosystems FAM/MST1 using a BioRad CFX96 Cat. No. 1855195). A decrease in MST1 mRNA and MSP expression in the liver tissue and circulating MSP in the blood from mice dosed with the MST1 siRNA1 or ASO1 is expected compared to MST1 mRNA and MSP expression in the liver tissue and circulating MSP in the blood from mice dosed with the non-specific controls. There is an expected decrease in neutrophil and macrophage counts in the bronchoalveolar lavage fluid in cigarette smoke exposed mice that receive the MST1 siRNA or ASO compared to the neutrophil and macrophage counts in the bronchoalveolar lavage fluid in cigarette smoke exposed mice that receive the non-specific control. There is also an expected decrease in air space and mean linear intercept and an increase in septal wall thickness in cigarette smoke exposed mice that receive the MST1 siRNA or ASO compared to the air space, mean linear intercept and septal wall thickness in cigarette smoke exposed mice that receive the non-specific control. Additionally, there is also an expected decrease in compliance and tidal volume and an increase in resistance in cigarette smoke exposed mice that receive the MST1 siRNA or ASO compared to the compliance, tidal volume and resistance in cigarette smoke exposed mice that receive the non-specific control. These results will show that an MST1 siRNA or ASO may elicit knockdown of MST1 mRNA and MSP in liver tissue and reduce circulating MSP, and that the decrease in MST1 mRNA and MSP expression may correspond with a decrease in neutrophil and macrophage counts in the bronchoalveolar lavage fluid and increased lung function and decreased pathology in mice exposed to cigarette smoke.

### Example 9: Screening siRNAs Targeting Human MST1 mRNA in Mice Transfected with AAV8-TBG-h-MST1

[0328] Several siRNAs targeting human MST1 mRNA were tested for activity in mice following transfection with an adeno-associated viral vector. The siRNAs were attached to the GalNAc ligand ETL1 followed by a phosphorothioate linkage at the 5′ end of the sense strand. The siRNAs used in this Example are included in Table 24A.

[0329] Six to eight week old female mice (C57Bl/6) were injected with 10 uL of a recombinant adeno-associated virus 8 (AAV8) vector (1.5×10E13 genome copies/mL) by the retroorbital route. The recombinant AAV8 contained the open reading frame and the majority of the 3′UTR of the human MST1 mRNA sequence (NM_020998.4) under the control of the human thyroxine binding globulin promoter in an AAV2 backbone packaged in AAV8 capsid (AAV8-TBG-h-MST1). On Day 14 after infection, serum was collected and the level of human MSP protein in each mouse was measured using the Human MSP/MST1/Macrophage Stimulating Protein ELISA Kit PicoKine™ from Boster Bio (Catalog #EK0814) according to the manufacturer's instructions using a serum sample dilution of 1:25 in PBS. Recombinant MSP included in the kit was used to generate a standard curve of 10,000 pg/mL to 0 pg/mL MSP. The optical density of the plate was read at 450 nm using a PerkinElmer Envision multimode plate reader. The concentration of MSP in each mouse serum sample was calculated from the standard curve by interpolation using least squares fit (Prism version 9, Software MacKiev).

[0330] Mice were allocated into groups (n=3) such that the groups had similar serum levels of human MSP and then given a subcutaneous injection of a single 100 ug dose of a GalNAc-conjugated siRNA or PBS as vehicle control. On Days 0, 4 and 13 after injection, serum was collected to assess serum MSP concentrations by ELISA using the methods described above. The MSP serum concentration at each timepoint was made relative to the level of MSP in the Day 0 sample for each individual mouse. The results are shown in Table 12. Mice injected with ETD01723 had the greatest reduction in serum MSP of the siRNAs tested, with lower levels on Day 13 than on Day 4 relative to Day 0. Mice injected with ETD01728, ETD01725 and ETD01729 also showed substantial reduction of serum MSP. Note that ETD01724 did not have its target sequence in the AAV8-TBG-h-MST1 construct and therefore functioned as a negative control siRNA in this study.

[0331] Mice were sacrificed on Day 13 and a liver sample from each was collected and placed in RNAlater (ThermoFisher Catalog #AM7020) until processing. Total liver RNA was prepared by homogenizing the liver tissue in homogenization buffer (Maxwell RSC simplyRNA Tissue Kit) using a Percellys 24 tissue homogenizer (Bertin Instruments) set at 5000 rpm for two 10 second cycles. Total RNA from the lysate was purified on a Maxwell RSC 48 platform (Promega Corporation) according to the manufacturer's recommendations. Preparation of cDNA was performed using Quanta qScript cDNA SuperMix (VWR, Catalog #95048-500) according to the manufacturer's instructions. The relative levels of liver MST1 mRNA were assessed by RT-qPCR in triplicate on a QuantStudio™ 6 Pro Real-Time PCR System using TaqMan assays for human MST1 (ThermoFisher, assay #Hs00360684 ml) and the mouse housekeeping gene PPIA (ThermoFisher, assay #Mm02342430_g1) and PerfeCTa® qPCR FastMix®, Low ROX™ (VWR, Catalog #101419-222). Data were normalized to the level in animals receiving PBS. Results are shown in Table 13. Mice injected with ETD01723, ETD01728, ETD01725, ETD01729 and ETD01731 had substantially lower levels in mean liver human MST1 mRNA on Day 13 relative to mice receiving PBS.

TABLE 12
Relative Mean Serum Human MSP
Levels in AAV8-TBG-h-MST1 Mice

| | | | | Mean serum human MSP | | |
|---|---|---|---|---|---|---|
| | | | Dose | (Relative to Day 0) | | |
| Group | n | Treatment | (ug) | Day 0 | Day 4 | Day 13 |
| 1 | 3 | PBS | | 1.00 | 0.94 | 0.66 |
| 2 | 3 | ETD01723 | 100 | 1.00 | 0.19 | 0.05 |
| 3 | 3 | ETD01724 | 100 | 1.00 | 1.15 | 0.79 |
| 4 | 3 | ETD01725 | 100 | 1.00 | 0.43 | 0.21 |
| 5 | 3 | ETD01726 | 100 | 1.00 | 0.92 | 0.83 |
| 6 | 3 | ETD01727 | 100 | 1.00 | 1.25 | 1.04 |
| 7 | 3 | ETD01728 | 100 | 1.00 | 0.15 | 0.13 |
| 8 | 3 | ETD01729 | 100 | 1.00 | 0.47 | 0.45 |
| 9 | 3 | ETD01731 | 100 | 1.00 | 1.55 | 0.75 |
| 10 | 3 | ETD01732 | 100 | 1.00 | 1.45 | 1.05 |
| 11 | 3 | ETD01733 | 100 | 1.00 | 1.26 | 1.26 |
| 12 | 3 | ETD01734 | 100 | 1.00 | 1.19 | 0.82 |

TABLE 13
Relative Human MST1 mRNA Levels
in Livers of AAV8-TBG-h-MST1 Mice

| | | | Dose | Mean human MST1 mRNA |
|---|---|---|---|---|
| Group | n | Treatment | (ug) | (Relative to Group 1, Day 13) |
| 1 | 3 | PBS | | 1.00 |
| 2 | 3 | ETD01723 | 100 | 0.15 |
| 3 | 3 | ETD01724 | 100 | 2.25 |
| 4 | 3 | ETD01725 | 100 | 0.31 |
| 5 | 3 | ETD01726 | 100 | 2.78 |
| 6 | 3 | ETD01727 | 100 | 2.78 |
| 7 | 3 | ETD01728 | 100 | 0.08 |
| 8 | 3 | ETD01729 | 100 | 0.01 |
| 9 | 3 | ETD01731 | 100 | 0.35 |
| 10 | 3 | ETD01732 | 100 | 0.97 |
| 11 | 3 | ETD01733 | 100 | 3.10 |
| 12 | 3 | ETD01734 | 100 | 0.92 |

### Example 10: Screening of Additional siRNAs Targeting Human MST1 mRNA in Mice Transfected with AAV8-TBG-h-MST1 and Confirmation of the Activity of ETD01723, ETD01725, ETD01728 and ETD01729

[0332] Additional siRNAs targeting human MST1 mRNA (ETD01795, ETD01798, ETD01799, ETD01800) were tested for activity in mice following transfection with an adeno-associated viral vector. The siRNAs were attached to the GalNAc ligand ETL17 followed by a phosphorothioate linkage at the 5′ end of the sense strand. Confirmation of the activities of ETD01723, ETD01725, ETD01728 and ETD01729 from the Example above was also performed. The siRNAs used in this Example are included in Table 24A.

[0333] Six to eight week old female mice (C57Bl/6) were injected with 10 uL of a recombinant adeno-associated virus 8 (AAV8) vector (1.5×10E13 genome copies/mL) by the retroorbital route. The recombinant AAV8 contained the open reading frame and the majority of the 3′UTR of the human MST1 sequence (NM_020998.4) under the control of the human thyroxine binding globulin promoter in an AAV2 backbone packaged in AAV8 capsid (AAV8-TBG-h-MST1). On Day 14 after infection, serum was collected and the level of human MSP in each mouse was measured using the Human MSP/MST1 DuoSet ELISA from R&D (Catalog #DY352). The manufacturer's instructions regarding all reagent preparations for buffers and solutions was followed. A serum sample dilution of 1:250 was utilized for all test samples. Recombinant MSP included in the kit was used to create a standard curve of 10,000 pg/mL to 0 pg/mL. The optical density of the plate was read at 450 nm using a PerkinElmer Envision multimode plate reader. The concentration of MSP in each mouse serum sample was calculated from the standard curve by interpolation using least squares fit (Prism version 9, Software MacKiev).

[0334] Mice were allocated into groups (n=3) such that the groups had similar serum levels of human MSP and then given a subcutaneous injection of a single 100 ug dose of a GalNAc-conjugated siRNA or PBS as vehicle control. On Days 0, 4 and 10 after injection, serum was collected to assess serum MSP concentrations by ELISA using the methods described above. The MSP serum concentration at each timepoint was made relative to the level of MSP in the Day 0 sample for each individual mouse. The results are shown in Table 14. Mice injected with ETD1799 or ETD01800 had the greatest reduction in serum MSP of the additional siRNAs tested, with lower levels on Day 10 than on Day 4 relative to Day 0. The activities of ETD01723, ETD01725, ETD01728 and ETD01729 was confirmed with treatment of mice with ETD01723 and ETD01728 yielding the greatest reduction in serum MSP. Of the additional siRNA targeting MST1 mRNA (ETD01795, ETD01798, ETD01799, ETD01800), ETD01799 and ETD01800 gave the largest reduction in serum MSP. Replacement of the ETL1 ligand on ETD01723 with the ETL17 ligand on the same sequence (ETD01823) resulted in a greater reduction in MSP.

[0335] Mice were sacrificed on Day 10 and a liver sample from each was collected and placed in RNAlater (ThermoFisher Cat #AM7020) until processing. Total liver RNA was prepared by homogenizing the liver tissue in homogenization buffer (Maxwell RSC simplyRNA Tissue Kit) using a Percellys 24 tissue homogenizer (Bertin Instruments) set at 5000 rpm for two 10 second cycles. Total RNA from the lysate was purified on a Maxwell RSC 48 platform (Promega Corporation) according to the manufacturer's recommendations. Preparation of cDNA was performed using Quanta qScript cDNA SuperMix (VWR, Catalog #95048-500) according to the manufacturer's instructions. The relative levels of liver MST1 mRNA were assessed by RT-qPCR in triplicate on a QuantStudio™ 6 Pro Real-Time PCR System using TaqMan assays for human MST1 (ThermoFisher, assay #Hs00360684) and the mouse housekeeping gene PPIA (ThermoFisher, assay #Mm02342430_g1) and PerfeCTa® qPCR FastMix®, Low ROX™ (VWR, Catalog #101419-222). Data were normalized to the level in animals receiving PBS. Results are shown in Table 15. Mice receiving siRNAs targeting MST1 had substantially lower levels in mean liver human MST1 mRNA on Day 10 relative to mice receiving PBS. The activities of ETD0723, ETD01725, ETD01728 and ETD01729 was confirmed with treatment of mice with ETD01723 and ETD51728 yielding the greatest reduction in liver MST1 mRNA. Of the additional siRNA targeting MST1 mRNA (ETD01795, ETD01798, ETD01799, ETD01800), ETD01799 and ETD01800 gave the largest reduction in in liver MST1 mRNA.

TABLE 14
Relative Mean Serum Human MSP
Levels in AAV8-TBG-h-MST1 Mice

| | | | | Mean serum human MSP | | |
|---|---|---|---|---|---|---|
| | | | Dose | (Relative to Day 0) | | |
| Group | n | Treatment | (ug) | Day 0 | Day 4 | Day 10 |
| 1 | 3 | PBS | | 1.00 | 2.58 | 1.33 |
| 2 | 3 | ETD01723 | 100 | 1.00 | 0.34 | 0.18 |
| 3 | 3 | ETD01823 | 100 | 1.00 | 0.41 | 0.13 |
| 4 | 3 | ETD01725 | 100 | 1.00 | 1.22 | 0.61 |
| 5 | 3 | ETD01728 | 100 | 1.00 | 0.30 | 0.12 |
| 6 | 3 | ETD01729 | 100 | 1.00 | 0.37 | 0.36 |
| 7 | 3 | ETD01795 | 100 | 1.00 | 1.18 | 0.53 |
| 8 | 3 | ETD01798 | 100 | 1.00 | 0.96 | 0.65 |
| 9 | 3 | ETD01799 | 100 | 1.00 | 0.26 | 0.17 |
| 10 | 3 | ETD01800 | 100 | 1.00 | 0.48 | 0.18 |

TABLE 15
Relative Human MST1 mRNA Levels
in Livers of AAV8-TBG-h-MST1 Mice

| | | | Dose | Mean human MST1 mRNA |
|---|---|---|---|---|
| Group | n | Treatment | (ug) | (Relative to Group 1, Day 10) |
| 1 | 3 | PBS | | 1.00 |
| 2 | 3 | ETD01723 | 100 | 0.05 |
| 3 | 3 | ETD01823 | 100 | 0.07 |
| 4 | 3 | ETD01725 | 100 | 0.21 |
| 5 | 3 | ETD01728 | 100 | 0.19 |
| 6 | 3 | ETD01729 | 100 | 0.28 |
| 7 | 3 | ETD01795 | 100 | 0.28 |
| 8 | 3 | ETD01798 | 100 | 0.25 |
| 9 | 3 | ETD01799 | 100 | 0.02 |
| 10 | 3 | ETD01800 | 100 | 0.03 |

### Example 11: Screening of Additional siRNAs Targeting Human MST1 in Mice Transfected with AAV8-TBG-h-MST1 and Testing the Activity of siRNAs Containing Alternative Modification Patterns of ETD01723 and ETD01728

[0336] Additional siRNAs targeting human MST1 mRNA (ETD01789 and ETD01794) were tested for activity in mice following transfection with an adeno-associated viral vector. The siRNAs were attached to the GalNAc ligand ETL1 followed by a phosphorothioate linkage at the 5′ end of the sense strand. The activities of siRNAs with alternative modification patterns of ETD01723 (ETD01827-ETD01831) and ETD01728 (ETD01832-ETD01837) were also assessed. The siRNAs were attached to the GalNAc ligand ETL17 followed by a phosphorothioate linkage at the 5′ end of the sense strand. The activities of ETD01827-ETD01831 were compared to ETD01823 which had the identical sequence and modification pattern to ETD01723 but attached to ETL17. The activities of ETD01832-ETD01837 were compared to ETD01821 which had the identical sequence and modification pattern to ETD01728 but attached to ETL17. The siRNAs used in this Example are included in Table 24A.

[0337] Six to eight week old female mice (C57Bl/6) were injected with 10 uL of a recombinant adeno-associated virus 8 (AAV8) vector (2.4×10E13 genome copies/mL) by the retroorbital route. The recombinant AAV8 contained the open reading frame and the majority of the 3′UTR of the human MST1 sequence (NM_020998.4) under the control of the human thyroxine binding globulin promoter in an AAV2 backbone packaged in AAV8 capsid (AAV8-TBG-h-MST1). On Day 13 after infection, serum was collected and the level of human MSP in each mouse was measured using the Human MSP/MST1 DuoSet ELISA from R&D (Catalog #DY352). The manufacturer's instructions regarding all reagent preparations for buffers and solutions was followed. A serum sample dilution of 1:250 was utilized for all test samples. Recombinant MSP included in the kit was used to create a standard curve of 10,000 pg/mL to 0 pg/mL. The optical density of the plate was read at 450 nm using a PerkinElmer Envision multimode plate reader. The concentration of MSP in each mouse serum sample was calculated from the standard curve by interpolation using least squares fit (Prism version 9, Software MacKiev).

[0338] Mice were allocated into groups (n=3) such that the groups had similar serum levels of human MSP and then given a subcutaneous injection of a single 60 ug dose of a GalNAc-conjugated siRNA or PBS as vehicle control. On Days 0 and 11 after injection, serum was collected to assess serum MSP concentrations by ELISA using the methods described above. The MSP serum concentration at each timepoint was made relative to the level of MSP protein in the Day 0 sample for each individual mouse. The results are shown in Table 16. Mice injected with ETD01789 or ETD01794 did not have greater reductions in serum MSP than ETD01823 or ETD01821 on Day 11. The activities of siRNAs with alternative modification patterns of ETD01723 and ETD01823, namely ETD01824-ETD01831 were comparable to ETD01823, with ETD01828 and ETD01831 showing the greatest level serum MSP reduction on Day 11. The activities of siRNAs with alternative modification patterns of ETD01728 and ETD01821, namely ETD01832-ETD01837 were comparable to ETD01823, with ETD01834, ETD01835 and ETD01836 showing the greatest level serum MSP reduction on Day 11.

[0339] Mice were sacrificed on Day 11 and a liver sample from each was collected and placed in RNAlater (ThermoFisher Cat #AM7020) until processing. Total liver RNA was prepared by homogenizing the liver tissue in homogenization buffer (Maxwell RSC simplyRNA Tissue Kit) using a Percellys 24 tissue homogenizer (Bertin Instruments) set at 5000 rpm for two 10 second cycles. Total RNA from the lysate was purified on a Maxwell RSC 48 platform (Promega Corporation) according to the manufacturer's recommendations. Preparation of cDNA was performed using Quanta qScript cDNA SuperMix (VWR, Catalog #95048-500) according to the manufacturer's instructions. The relative levels of liver MST1 mRNA were assessed by RT-qPCR in triplicate on a QuantStudio™ 6 Pro Real-Time PCR System using TaqMan assays for human MST1 (ThermoFisher, assay #Hs00360684 ml) and the mouse housekeeping gene PPIA (ThermoFisher, assay #Mm02342430_g1) and PerfeCTa® qPCR FastMix®, Low ROX™ (VWR, Catalog #101419-222). Data were normalized to the level in animals receiving PBS. Results are shown in Table 17. Mice injected with ETD01789 or ETD01794 did not have greater reductions in liver MST1 mRNA than ETD01823 or ETD01821 on Day 11. The mRNA reduction activities of mice receiving siRNAs with alternative modification patterns of ETD01723 and ETD01823, namely ETD01824-ETD01831, were comparable to ETD01823 relative to mice receiving PBS. The activities of siRNAs with alternative modification patterns of ETD01728 and ETD01821, namely ETD01832-ETD01837, were comparable to ETD01821.

TABLE 16
Relative Mean Serum Human MSP
Levels in AAV8-TBG-h-MST1 Mice

| | | | | Mean serum human MSP | |
|---|---|---|---|---|---|
| | | | Dose | (Relative to Day 0) | |
| Group | n | Treatment | (ug) | Day 0 | Day 11 |
| 1 | 3 | PBS | | 1.00 | 0.79 |
| 2 | 3 | ETD01823 | 60 | 1.00 | 0.08 |
| 3 | 3 | ETD01827 | 60 | 1.00 | 0.14 |
| 4 | 3 | ETD01828 | 60 | 1.00 | 0.05 |
| 5 | 3 | ETD01829 | 60 | 1.00 | 0.16 |
| 6 | 3 | ETD01830 | 60 | 1.00 | 0.12 |
| 7 | 3 | ETD01831 | 60 | 1.00 | 0.10 |
| 8 | 3 | ETD01821 | 60 | 1.00 | 0.06 |
| 9 | 3 | ETD01832 | 60 | 1.00 | 0.07 |
| 10 | 3 | ETD01833 | 60 | 1.00 | 0.06 |
| 11 | 3 | ETD01834 | 60 | 1.00 | 0.04 |
| 12 | 3 | ETD01835 | 60 | 1.00 | 0.01 |
| 13 | 3 | ETD01836 | 60 | 1.00 | 0.04 |
| 14 | 3 | ETD01837 | 60 | 1.00 | 0.17 |
| 15 | 3 | ETD01789 | 60 | 1.00 | 0.26 |
| 16 | 3 | ETD01794 | 60 | 1.00 | 1.51 |

TABLE 17
Relative Human MST1 mRNA Levels
in Livers of AAV8-TBG-h-MST1 Mice

| | | | Dose | Mean human MST1 m RNA |
|---|---|---|---|---|
| Group | n | Treatment | (ug) | (Relative to Group 1, Day 11) |
| 1 | 3 | PBS | | 1.00 |
| 2 | 3 | ETD01823 | 60 | 0.13 |
| 3 | 3 | ETD01827 | 60 | 0.30 |
| 4 | 3 | ETD01828 | 60 | 0.13 |
| 5 | 3 | ETD01829 | 60 | 0.23 |
| 6 | 3 | ETD01830 | 60 | 0.12 |
| 7 | 3 | ETD01831 | 60 | 0.24 |
| 8 | 3 | ETD01821 | 60 | 0.17 |
| 9 | 3 | ETD01832 | 60 | 0.10 |
| 10 | 3 | ETD01833 | 60 | 0.23 |
| 11 | 3 | ETD01834 | 60 | 0.16 |
| 12 | 3 | ETD01835 | 60 | 0.23 |
| 13 | 3 | ETD01836 | 60 | 0.18 |
| 14 | 3 | ETD01837 | 60 | 0.19 |
| 15 | 3 | ETD01789 | 60 | 0.80 |
| 16 | 3 | ETD01794 | 60 | 0.91 |

### Example 12: Screening of Additional siRNAs Targeting Human MST1 in Mice Transfected with AAV8-TBG-h-MST1

[0340] Additional siRNAs targeting human MST1, namely ETD 1860-ETD01868, were tested for activity in mice following transfection with an adeno-associated viral vector. The siRNAs were attached to the GalNAc ligand ETL17 followed by a phosphorothioate linkage at the 5′ end of the sense strand. The siRNAs ETD01823 and ETD01800 were included as positive controls. The siRNAs used in this Example are included in Table 24A.

[0341] Six to eight week old female mice (C571B1/6) were injected with 10 uL of a recombinant adeno-associated virus 8 (AAV8) vector (2.4×10E13 genome copies/mL) by the retroorbital route. The recombinant AAV8 contained the open reading frame and the majority of the 3′UTR of the human MST1 sequence (NM_020998.4) under the control of the human thyroxine binding globulin promoter in an AAV2 backbone packaged in AAV8 capsid (AAV8-TBG-h-MST1). On Day 14 after infection, serum was collected and the level of human MSP in each mouse was measured using the Human MSP/MST1 DuoSet ELISA from R&D (Catalog #DY352). The manufacturer's instructions regarding all reagent preparations for buffers and solutions were followed. A serum sample dilution of 1: 50 was utilized for all test samples. Recombinant MSP included in the kit was used to create a standard curve of 10,000 pg/mL to 0 pg/mL. The optical density of the plate was read at 450 nm using a PerkinElmer Envision multimode plate reader. The concentration of MSP in each mouse serum sample was calculated from the standard curve by interpolation using least squares fit (Prism version 9, Software MacKiev).

[0342] Mice were allocated into groups (n=3) such that the groups had similar serum levels of MSP and then given a subcutaneous injection of a single 100 ug dose of a GalNAc-conjugated siRNA or PBS as vehicle control. On Days 0 and 10 after injection, serum was collected to assess serum MSP concentrations by ELISA using the methods described above. The MSP serum concentration at each timepoint was made relative to the level of MSP in the Day 0 sample for each individual mouse. The results are shown in Table 18. Mice injected with ETD01867 or ETD01868 had the greatest reduction in serum MSP of the additional siRNAs tested. The magnitude of the reduction was comparable to ETD01823 and ETD01800.

[0343] Mice were sacrificed on Day 10 and a liver sample from each was collected and placed in RNAlater (ThermoFisher Cat #AM7020) until processing. Total liver RNA was prepared by homogenizing the liver tissue in homogenization buffer (Maxwell RSC simplyRNA Tissue Kit) using a Percellys 24 tissue homogenizer (Bertin Instruments) set at 5000 rpm for two 10 second cycles. Total RNA from the lysate was purified on a Maxwell RSC 48 platform (Promega Corporation) according to the manufacturer's recommendations. Preparation of cDNA was performed using Quanta qScript cDNA SuperMix (VWR, Catalog #95048-500) according to the manufacturer's instructions. The relative levels of liver MST1 mRNA were assessed by RT-qPCR in triplicate on a QuantStudio™ 6 Pro Real-Time PCR System using TaqMan assays for human MST1 (ThermoFisher, assay #Hs00360684 ml) and the mouse housekeeping gene PPIA (ThermoFisher, assay #Mm02342430_g1) and PerfeCTa® qPCR FastMix®, Low ROX™ (VWR, Catalog #101419-222). Data were normalized to the level in animals receiving PBS. Results are shown in Table 19. Of the additional siRNAs tested in this Example, ETD01867 and ETD01868 had the greatest MST1 mRNA reduction activity, which was comparable to the MST1 mRNA reduction activity observed with ETD01823 and ETD01800.

TABLE 18
Relative Mean Serum Human MSP
Levels in AAV8-TBG-h-MST1 Mice

| | | | | Mean serum human MSP | |
|---|---|---|---|---|---|
| | | | Dose | (Relative to Day 0) | |
| Group | n | Treatment | (ug) | Day 0 | Day 10 |
| 1 | 3 | PBS | | 1.00 | 0.80 |
| 2 | 3 | ETD01823 | 100 | 1.00 | 0.10 |
| 3 | 3 | ETD01800 | 100 | 1.00 | 0.16 |
| 4 | 3 | ETD01860 | 100 | 1.00 | 0.55 |
| 5 | 3 | ETD01861 | 100 | 1.00 | 1.00 |
| 6 | 3 | ETD01862 | 100 | 1.00 | 0.86 |
| 7 | 3 | ETD01863 | 100 | 1.00 | 0.74 |
| 8 | 3 | ETD01864 | 100 | 1.00 | 1.01 |
| 9 | 3 | ETD01865 | 100 | 1.00 | 0.34 |
| 10 | 3 | ETD01866 | 100 | 1.00 | 0.60 |
| 11 | 3 | ETD01867 | 100 | 1.00 | 0.09 |
| 12 | 3 | ETD01868 | 100 | 1.00 | 0.17 |

TABLE 19
Relative Human MST1 mRNA Levels
in Livers of AAV8-TBG-h-MST1 Mice

| | | | Dose | Mean human MST1 mRNA |
|---|---|---|---|---|
| Group | n | Treatment | (ug) | (Relative to Group 1, Day 10) |
| 1 | 3 | PBS | | 1.00 |
| 2 | 3 | ETD01823 | 100 | 0.18 |
| 3 | 3 | ETD01800 | 100 | 0.16 |
| 4 | 3 | ETD01860 | 100 | 1.17 |
| 5 | 3 | ETD01861 | 100 | 2.13 |
| 6 | 3 | ETD01862 | 100 | 1.06 |
| 7 | 3 | ETD01863 | 100 | 1.74 |
| 8 | 3 | ETD01864 | 100 | 0.90 |
| 9 | 3 | ETD01865 | 100 | 0.76 |
| 10 | 3 | ETD01866 | 100 | 0.93 |
| 11 | 3 | ETD01867 | 100 | 0.17 |
| 12 | 3 | ETD01868 | 100 | 0.30 |

### Example 13: Testing the Activity of siRNAs Containing Alternative Modification Patterns of ETD01800 Targeting Human MST1 in Mice Transfected with AAV8-TBG-h-MST1

[0344] The activities of siRNAs with alternative modification patterns of ETD01800, namely ETD01871-ETD01878 were assessed. The siRNAs with alternative modifications were attached to the GalNAc ligand ETL17 followed by a phosphorothioate linkage at the 5′ end of the sense strand. The activities of ETD01871-ETD01878 were compared to ETD01800. The siRNAs used in this Example are included in Table 24A.

[0345] Six to eight week old female mice (C571B1/6) were injected with 10 uL of a recombinant adeno-associated virus 8 (AAV8) vector (2.7×10E13 genome copies/mL) by the retroorbital route. The recombinant AAV8 contained the open reading frame and the majority of the 3′UTR of the human MST1 sequence (NM_020998.4) under the control of the human thyroxine binding globulin promoter in an AAV2 backbone packaged in AAV8 capsid (AAV8-TBG-h-MST1). On Day 13 after infection, serum was collected and the level of human MSP in each mouse was measured using the Human MSP/MST1 DuoSet ELISA from R&D (Catalog #DY352). The manufacturer's instructions regarding all reagent preparations for buffers and solutions was followed. A serum sample dilution of 1:100 was utilized for all test samples. Recombinant MSP included in the kit was used to create a standard curve of 10,000 pg/mL to 0 pg/mL. The optical density of the plate was read at 450 nm using a PerkinElmer Envision multimode plate reader. The concentration of MSP in each mouse serum sample was calculated from the standard curve by interpolation using least squares fit (Prism version 9, Software MacKiev).

[0346] Mice were allocated into groups (n=3) such that the groups had similar serum levels of MSP and then given a subcutaneous injection of a single 60 ug dose of a GalNAc-conjugated siRNA or PBS as vehicle control. On Days 0 and 10 after injection, serum was collected to assess serum MSP concentrations by ELISA using the methods described above. The MSP serum concentration at each timepoint was made relative to the level of MSP in the Day 0 sample for each individual mouse. The results are shown in Table 20. The activities of siRNAs with alternative modification patterns of ETD01800, namely ETD01871-ETD01878 were comparable to ETD01800, with ETD01873 and ETD01878 showing the greatest level serum MSP reduction on Day 10.

[0347] Mice were sacrificed on Day 10 and a liver sample from each was collected and placed in RNAlater (ThermoFisher Cat #AM7020) until processing. Total liver RNA was prepared by homogenizing the liver tissue in homogenization buffer (Maxwell RSC simplyRNA Tissue Kit) using a Percellys 24 tissue homogenizer (Bertin Instruments) set at 5000 rpm for two 10 second cycles. Total RNA from the lysate was purified on a Maxwell RSC 48 platform (Promega Corporation) according to the manufacturer's recommendations. Preparation of cDNA was performed using Quanta qScript cDNA SuperMix (VWR, Catalog #95048-500) according to the manufacturer's instructions. The relative levels of liver MST1 mRNA were assessed by RT-qPCR in triplicate on a QuantStudio™ 6 Pro Real-Time PCR System using TaqMan assays for human MST1 (ThermoFisher, assay #Hs00360684 ml) and the mouse housekeeping gene PPIA (ThermoFisher, assay #Mm02342430_g1) and PerfeCTa® qPCR FastMix®, Low ROX™ (VWR, Catalog #101419-222). Data were normalized to the level in animals receiving PBS. Results are shown in Table 21. Mice receiving ETD01800 had substantially lower liver MST1 mRNA on Day 10 relative to mice receiving PBS. Mice receiving any of the alternatively modified siRNAs targeting MST1 also had substantially lower levels in mean liver human MST1 mRNA on Day 10 relative to mice receiving PBS.

TABLE 20
Relative Mean Serum Human MSP
Levels in AAV8-TBG-h-MST1 Mice

| | | | | Mean serum human MSP | | |
|---|---|---|---|---|---|---|
| | | | Dose | (Relative to Day 0) | | |
| Group | n | Treatment | (ug) | Day 0 | Day 4 | Day 10 |
| 1 | 3 | PBS | | 1.00 | 4.18 | 2.45 |
| 2 | 3 | ETD01800 | 60 | 1.00 | 0.39 | 0.34 |
| 3 | 3 | ETD01871 | 60 | 1.00 | 0.48 | 0.57 |
| 4 | 3 | ETD01872 | 60 | 1.00 | 0.60 | 0.48 |
| 5 | 3 | ETD01873 | 60 | 1.00 | 0.86 | 0.19 |
| 6 | 3 | ETD01874 | 60 | 1.00 | 0.66 | 0.30 |
| 7 | 3 | ETD01875 | 60 | 1.00 | 0.85 | 0.38 |
| 8 | 3 | ETD01876 | 60 | 1.00 | 0.63 | 0.51 |
| 9 | 3 | ETD01877 | 60 | 1.00 | 0.39 | 0.44 |
| 10 | 3 | ETD01878 | 60 | 1.00 | 1.71 | 0.20 |

TABLE 21
Relative Human MST1 mRNA Levels
in Livers of AAV8-TBG-h-MST1 Mice

| | | | Dose | Mean human MST1 mRNA |
|---|---|---|---|---|
| Group | n | Treatment | (ug) | (Relative to Group 1, Day 10) |
| 1 | 3 | PBS | | 1.00 |
| 2 | 3 | ETD01800 | 60 | 0.17 |
| 3 | 3 | ETD01871 | 60 | 0.21 |
| 4 | 3 | ETD01872 | 60 | 0.19 |
| 5 | 3 | ETD01873 | 60 | 0.04 |
| 6 | 3 | ETD01874 | 60 | 0.12 |
| 7 | 3 | ETD01875 | 60 | 0.06 |
| 8 | 3 | ETD01876 | 60 | 0.11 |
| 9 | 3 | ETD01877 | 60 | 0.03 |
| 10 | 3 | ETD01878 | 60 | 0.04 |

### Example 14: Testing the activity of MST1 siRNAs Containing Alternative Modification Patterns of ETD01867 and ETD01868 in in Mice Transfected with AAV8-TBG-h-MST1

[0348] The activities of siRNAs with alternative modification patterns of ETD01867, namely ETD01963-ETD01966, and siRNAs with alternative modification patterns of ETD01868, namely ETD01967-ETD01972, were assessed. The siRNAs were attached to the GalNAc ligand ETL17 followed by a phosphorothioate linkage at the 5′ end of the sense strand. The siRNAs used in this Example are included in Table 24A.

[0349] Six to eight week old female mice (C571B1/6) were injected with 5 uL of a recombinant adeno-associated virus 8 (AAV8) vector (2.7×10E13 genome copies/mL) by the retroorbital route. The recombinant AAV8 contained the open reading frame and the majority of the 3′UTR of the human MST1 sequence (NM_020998.4) under the control of the human thyroxine binding globulin promoter in an AAV2 backbone packaged in AAV8 capsid (AAV8-TBG-h-MST1). On Day 13 after infection, serum was collected and the level of human MSP in each mouse was measured using the Human MSP/MST1 DuoSet ELISA from R&D (Catalog #DY352). The manufacturer's instructions regarding all reagent preparations for buffers and solutions was followed. A serum sample dilution of 1:50 was utilized for all test samples. Recombinant MSP included in the kit was used to create a standard curve of 10,000 pg/mL to 0 pg/mL. The optical density of the plate was read at 450 nm using a PerkinElmer Envision multimode plate reader. The concentration of MSP in each mouse serum sample was calculated from the standard curve by interpolation using least squares fit (Prism version 9, Software MacKiev).

[0350] Mice were allocated into groups (n=3) such that the groups had similar serum levels of MSP and then given a subcutaneous injection of a single 60 ug dose of a GalNAc-conjugated siRNA or PBS as vehicle control. On Days 0, 4 and 12 after injection, serum was collected to assess serum MSP concentrations by ELISA using the methods described above. The MSP serum concentration at each timepoint was made relative to the level of MSP in the Day 0 sample for each individual mouse. The results are shown in Table 22. The activities of siRNAs with alternative modification patterns of ETD01867, namely ETD01963-ETD01966, were comparable to ETD01867, with ETD01964 and ETD01966 showing the greatest level serum MSP reduction on Day 12. The activities of siRNAs with alternative modification patterns of ETD01868, namely ETD01967-ETD01972, were comparable to ETD01868, with ETD01972 showing the greatest level serum MSP reduction on Day 12.

[0351] Mice were sacrificed on Day 12 and a liver sample from each was collected and placed in RNAlater (ThermoFisher Cat #AM7020) until processing. Total liver RNA was prepared by homogenizing the liver tissue in homogenization buffer (Maxwell RSC simplyRNA Tissue Kit) using a Percellys 24 tissue homogenizer (Bertin Instruments) set at 5000 rpm for two 10 second cycles. Total RNA from the lysate was purified on a Maxwell RSC 48 platform (Promega Corporation) according to the manufacturer's recommendations. Preparation of cDNA was performed using Quanta qScript cDNA SuperMix (VWR, Catalog #95048-500) according to the manufacturer's instructions. The relative levels of liver MST1 mRNA were assessed by RT-qPCR in triplicate on a QuantStudio™ 6 Pro Real-Time PCR System using TaqMan assays for human MST1 (ThermoFisher, assay #Hs00360684 ml) and the mouse housekeeping gene PPIA (ThermoFisher, assay #Mm02342430_g1) and PerfeCTa® qPCR FastMix®, Low ROX™ (VWR, Catalog #101419-222). Data were normalized to the level in animals receiving PBS. Results are shown in Table 23. The activities of siRNAs with alternative modification patterns of ETD01867, namely ETD01965 and ETD01966, showed similar or slightly better activity than the parent for MST1 mRNA reduction on Day 12. The activities of siRNAs with alternative modification patterns of ETD01868, namely ETD01967 and ETD01972, showed the highest MST1 mRNA reduction on Day 12.

TABLE 22
Relative Mean Serum Human MSP
Levels in AAV8-TBG-h-MST1 Mice

| | | | | Mean serum human MSP | | |
|---|---|---|---|---|---|---|
| | | | Dose | (Relative to Day 0) | | |
| Group | n | Treatment | (ug) | Day 0 | Day 4 | Day 12 |
| 1 | 3 | PBS | | 1.00 | 1.12 | 1.54 |
| 2 | 3 | ETD01867 | 60 | 1.00 | 0.35 | 0.24 |
| 3 | 3 | ETD01963 | 60 | 1.00 | 0.46 | 0.42 |
| 4 | 3 | ETD01964 | 60 | 1.00 | 0.35 | 0.15 |
| 5 | 3 | ETD01965 | 60 | 1.00 | 0.32 | 0.26 |
| 6 | 3 | ETD01966 | 60 | 1.00 | 0.30 | 0.16 |
| 7 | 3 | ETD01868 | 60 | 1.00 | 0.67 | ND |
| 8 | 3 | ETD01967 | 60 | 1.00 | 0.41 | 0.27 |
| 9 | 3 | ETD01968 | 60 | 1.00 | 0.53 | 0.30 |
| 10 | 3 | ETD01969 | 60 | 1.00 | 0.68 | 0.45 |
| 11 | 3 | ETD01970 | 60 | 1.00 | 0.51 | 0.59 |
| 12 | 3 | ETD01971 | 60 | 1.00 | 0.60 | 0.42 |
| 13 | 3 | ETD01972 | 60 | 1.00 | 0.24 | 0.17 |

ND, not determined

TABLE 23
Relative Human MST1 mRNA Levels
in Livers of AAV8-TBG-h-MST1 Mice

| | | | Dose | Mean human MST1 mRNA |
|---|---|---|---|---|
| Group | n | Treatment | (ug) | (Relative to Group 1, Day 12) |
| 1 | 3 | PBS | | 1.00 |
| 2 | 3 | ETD01867 | 60 | 0.40 |
| 3 | 3 | ETD01963 | 60 | 0.76 |
| 4 | 3 | ETD01964 | 60 | 0.60 |
| 5 | 3 | ETD01965 | 60 | 0.25 |
| 6 | 3 | ETD01966 | 60 | 0.33 |
| 7 | 3 | ETD01868 | 60 | 0.28 |
| 8 | 3 | ETD01967 | 60 | 0.07 |
| 9 | 3 | ETD01968 | 60 | 0.32 |
| 10 | 3 | ETD01969 | 60 | 0.15 |
| 11 | 3 | ETD01970 | 60 | 0.24 |
| 12 | 3 | ETD01971 | 60 | 0.31 |
| 13 | 3 | ETD01972 | 60 | 0.08 |

TABLE 24A
siRNAs Screened for Activity in AAV8-TBG-h-MST1 Mice

| | SEQ | | SEQ | |
|---|---|---|---|---|
| SiRNA | ID | Sense Strand Sequence (5′-3′) | ID | |
| Name | NO: | with GalNAc Moiety | NO: | Antisense Strand Sequence (5′-3′) |
| ETD01723 | 6186 | [ETL1]csusucUfUfgUfCfagacauaaaasusu | 6245 | usUfsuUfaUfgUfcUfgAfcAfaGfaAfgsusu |
| ETD01724 | 6187 | [ETL1]saaaaGfuuuAfAfugucacccasusu | 6246 | usGfsgGfuGfaCfaUfuAfaAfcUfuUfususu |
| ETD01725 | 6188 | [ETL1]sAfaCfuUfcUfudGuCfagaCfaUfaasus | 6247 | usUfsaUfgUfcUfgAfcAfaGfaAfgUfususu |
| | | u | | |
| ETD01726 | 6189 | [ETL1]sUfaAfuGfaCfadCaguCfcUfaaaasusu | 6248 | usUfsuUfaGfgAfcUfgUfgUfcAfuUfasusu |
| ETD01727 | 6190 | [ETL1]sguaaugAfcAfcAfguccuaaasusu | 6249 | usUfsuAfgGfaCfuGfuGfuCfaUfuAfcsusu |
| ETD01728 | 6191 | [ETL1]sgguccuGfGfAfAfGfgaauuauasusu | 6250 | usAfsuAfaUfuCfcUfuCfcAfgGfaCfcsusu |
| ETD01729 | 6192 | [ETL1]scaaccAfGfGfAfGfuguaacauasusu | 6251 | usAfsuGfuUfaCfaCfuCfcUfgGfuUfgsusu |
| ETD01731 | 6193 | [ETL1]sccugAfAfuGfGfuAfuguggugasusu | 6252 | usCfsaCfcAfcAfuAfcCfaUfuCfaGfgsusu |
| ETD01732 | 6194 | [ETL1]scacagUfCfCfUfaaauguggcasusu | 6253 | usGfscCfaCfaUfuUfaGfgAfcUfgUfgsusu |
| ETD01733 | 6195 | [ETL1]scaagccGfcAfGfuucacguuasusu | 6254 | usAfsaCfgUfgAfaCfuGfcGfgCfuUfgsusu |
| ETD01734 | 6196 | [ETL1]sucuuCfaCfgCfgugucucugasusu | 6255 | usCfsaGfaGfaCfaCfgCfgUfgAfaGfasusu |
| ETD01789 | 6197 | [ETL1]sacuaUfUfgCfCfggaauccugasusu | 6256 | usCfsaGfgAfuUfcCfgGfcAfaUfaGfususu |
| ETD01794 | 6198 | [ETL1]sauucGfAfcuAfcugugcccuasusu | 6257 | usAfsgGfgCfaCfaGfuAfgUfcGfaAfususu |
| ETD01795 | 6199 | [ETL1]saguuuGfAfGfAfAfguguggcaasusu | 6258 | usUfsgCfcAfcAfcUfuCfuCfaAfaCfususu |
| ETD01798 | 6200 | [ETL1]saugacAfcAfGfuccuaaaugasusu | 6259 | usCfsaUfuUfaGfgAfcUfgUfgUfcAfususu |
| ETD01799 | 6201 | [ETL1]sacaaaaCfUfUfCfUfugucagaasusu | 6260 | usUfscUfgAfcAfaGfaAfgUfuUfuGfususu |
| ETD01800 | 6202 | [ETL1]sacuuCfUfugUfCfagacauaaasusu | 6261 | usUfsuAfuGfuCfuGfaCfaAfgAfaGfususu |
| ETD01821 | 6203 | [ETL17]sgguccuGfGfAfAfGfgaauuauasusu | 6262 | usAfsuAfaUfuCfcUfuCfcAfgGfaCfcsusu |
| ETD01822 | 6204 | [ETL17]sAfaCfuUfcUfudGuCfagaCfaUfaasu | 6263 | usUfsaUfgUfcUfgAfcAfaGfaAfgUfususu |
| | | su | | |
| ETD01823 | 6205 | [ETL17]scuucUfUfgUfCfagacauaaaasusu | 6264 | usUfsuUfaUfgUfcUfgAfcAfaGfaAfgsusu |
| ETD01826 | 6206 | [ETL17]scaaccAfGfGfAfGfuguaacauasusu | 6265 | usAfsuGfuUfaCfaCfuCfcUfgGfuUfgsusu |
| ETD01827 | 6207 | [ETL17]scuucUfUfgUfCfagacauaaaususu | 6266 | asUfsuUfaUfgUfcUfgAfcAfaGfaAfgsusu |
| ETD01828 | 6208 | [ETL17]scuucUfUfgUfCfagacauaaaasusu | 6267 | usUfsuUfaUfgucugAfcAfaGfaAfgsusu |
| ETD01829 | 6209 | [ETL17]scuucUfUfgUfCfagacauaaaasusu | 6268 | usUfsuUfaugUfcugAfcAfaGfaAfgsusu |
| ETD01830 | 6210 | [ETL17]scuucUfUfgUfCfagacauaaaasusu | 6269 | usUfsuuaUfgUfcUfgAfcAfaGfaAfgsusu |
| ETD01831 | 6211 | [ETL17]scuucUfUfgUfCfagacauaaagsusu | 6270 | csUfsuUfaUfgUfcUfgAfcAfaGfaAfgsusu |
| ETD01832 | 6212 | [ETL17]sgguccuGfGfAfAfGfgaauuauasusu | 6271 | usAfsuaaUfuCfcUfuCfcAfgGfaCfcsusu |
| ETD01833 | 6213 | [ETL17]sgguccuGfGfAfAfGfgaauuauasusu | 6272 | usAfsuAfaUfuccUfuCfcAfgGfaCfcsusu |
| ETD01834 | 6214 | [ETL17]sgguccuGfGfAfAfGfgaauuauasusu | 6273 | usAfsuAfaUfuccuuCfcAfgGfaCfcsusu |
| ETD01835 | 6215 | [ETL17]sgguccuGfGfAfAfGfgaauuauasusu | 6274 | usAfsuAfauuCfcUfuCfcAfgGfaCfcsusu |
| ETD01836 | 6216 | [ETL17]sgguccuGfGfAfAfGfgaauuauasusu | 6275 | usAfsuAfauUfCfcUfuCfcAfgGfaCfcsusu |
| ETD01837 | 6217 | [ETL17]sgguccuGfGfAfAfGfgaauuauususu | 6276 | asAfsuAfaUfuCfcUfuCfcAfgGfaCfcsusu |
| ETD01860 | 6218 | [ETL17]sgacaaCfUfaUfUfgccggaauasusu | 6277 | usAfsuUfcCfgGfcAfaUfaGfuUfgUfcsusu |
| ETD01861 | 6219 | [ETL17]sugacaCfagUfCfcuaaauguasusu | 6278 | usAfscAfuUfuAfgGfaCfuGfuGfuCfasusu |
| ETD01862 | 6220 | [ETL17]saguccuAfaAfuGfuggccuuasusu | 6279 | usAfsaGfgCfcAfcAfuUfuAfgGfaCfususu |
| ETD01863 | 6221 | [ETL17]sgagugUfaaCfaUfcaagcacasusu | 6280 | usGfsuGfcUfuGfaUfgUfuAfcAfcUfcsusu |
| ETD01864 | 6222 | [ETL17]sguguaaCfaUfCfaagcaccgasusu | 6281 | usCfsgGfuGfcUfuGfaUfgUfuAfcAfcsusu |
| ETD01865 | 6223 | [ETL17]sauuaUfaaUfCfCfCfcaaccgaasusu | 6282 | usUfscGfgUfuGfgGfgAfuUfaUfaAfususu |
| ETD01866 | 6224 | [ETL17]suauaaUfCfCfCfCfaaccgaguasusu | 6283 | usAfscUfcGfgUfuGfgGfgAfuUfaUfasusu |
| ETD01867 | 6225 | [ETL17]sucuuGfucAfGfacauaaagcasusu | 6284 | usGfscUfuUfaUfgUfcUfgAfcAfaGfasusu |
| ETD01868 | 6226 | [ETL17]suuguCfagaCfaUfaaagccaasusu | 6285 | usUfsgGfcUfuUfaUfgUfcUfgAfcAfasusu |
| ETD01871 | 6227 | [ETL17]sacuuCfUfugUfCfagacauaaasusu | 6286 | usUfsuAfuGfuCfuGfaCfaAfgAfaGfususu |
| ETD01872 | 6228 | [ETL17]sacuucUfugUfCfagacauaaasusu | 6287 | usUfsuAfuGfuCfuGfaCfaAfgAfaGfususu |
| ETD01873 | 6229 | [ETL17]sacuucuUfgUfCfagacauaaasusu | 6288 | usUfsuAfuGfuCfuGfaCfaAfgAfaGfususu |
| ETD01874 | 6230 | [ETL17]sacuuCfUfugUfCfagacauaaususu | 6289 | asUfsuAfuGfuCfuGfaCfaAfgAfaGfususu |
| ETD01875 | 6231 | [ETL17]sacuuCfUfugUfCfagacauaaasusu | 6290 | usUfsuauGfuCfuGfaCfaAfgAfaGfususu |
| ETD01876 | 6232 | [ETL17]sacuuCfUfugUfCfagacauaaasusu | 6291 | usUfsuAfuguCfuGfaCfaAfgAfaGfususu |
| ETD01877 | 6233 | [ETL17]sacuuCfUfugUfCfagacauaaasusu | 6292 | usUfsuaUfgUfcuGfaCfaAfgAfaGfususu |
| ETD01878 | 6234 | [ETL17]sacuuCfUfugUfCfagacauaaasusu | 6293 | usUfsuaugUfcuGfaCfaAfgAfaGfususu |
| ETD01963 | 6235 | [ETL17]sucuuGfucAfGfacauaaagcasusu | 6294 | usGfscuuUfaUfgUfcUfgAfcAfaGfasusu |
| ETD01964 | 6236 | [ETL17]sucuuGfucAfGfacauaaagcasusu | 6295 | usGfscuuUfaugUfcUfgAfcAfaGfasusu |
| ETD01965 | 6237 | [ETL17]sucuuGfucAfGfacauaaagcasusu | 6296 | usGfscUfuUfaUfgucUfgAfcAfaGfasusu |
| ETD01966 | 6238 | [ETL17]sucuuGfucAfGfacauaaagcasusu | 6297 | usGfscUfuuAfugUfcUfgAfcAfaGfasusu |
| ETD01967 | 6239 | [ETL17]suuguCfadGaCfaUfaaagccaasusu | 6298 | usUfsgGfcUfuUfaUfgUfcUfgAfcAfasusu |
| ETD01968 | 6240 | [ETL17]suugucagaCfdAUfaaagccaasusu | 6299 | usUfsgGfcUfuUfaUfgUfcUfgAfcAfasusu |
| ETD01969 | 6241 | [ETL17]suuguCfagaCfaUfaaagccaasusu | 6300 | usUfsggcUfuUfaUfgUfcUfgAfcAfasusu |
| ETD01970 | 6242 | [ETL17]suuguCfagaCfaUfaaagccaasusu | 6301 | usUfsgGfcUfuUfaugUfcUfgAfcAfasusu |
| ETD01971 | 6243 | [ETL17]suuguCfagaCfaUfaaagccaasusu | 6302 | usUfsggcUfuUfaugUfcUfgAfcAfasusu |
| ETD01972 | 6244 | [ETL17]suuguCfagaCfaUfaaagccaasusu | 6303 | usUfsggCfuuuaUfgUfcUfgAfcAfasusu |

TABLE 24B
Base Sequences of Example siRNAs

| | SEQ | Base Sequence (5′-3′) | SEQ | Base Sequence (5′-3′) |
|---|---|---|---|---|
| SiRNA | ID | of Sense Strand, | ID | of Antisense Strand, |
| Name | NO: | Without 3′ Overhang | NO: | Without 3′ Overhang |
| ETD01723 | 6418 | CUUCUUGUCAGACAUAAAA | 6477 | UUUUAUGUCUGACAAGAAG |
| ETD01724 | 6419 | AAAAGUUUAAUGUCACCCA | 6478 | UGGGUGACAUUAAACUUUU |
| ETD01725 | 6420 | AACUUCUUGUCAGACAUAA | 6479 | UUAUGUCUGACAAGAAGUU |
| ETD01726 | 6421 | UAAUGACACAGUCCUAAAA | 6480 | UUUUAGGACUGUGUCAUUA |
| ETD01727 | 6422 | GUAAUGACACAGUCCUAAA | 6481 | UUUAGGACUGUGUCAUUAC |
| ETD01728 | 6423 | GGUCCUGGAAGGAAUUAUA | 6482 | UAUAAUUCCUUCCAGGACC |
| ETD01729 | 6424 | CAACCAGGAGUGUAACAUA | 6483 | UAUGUUACACUCCUGGUUG |
| ETD01731 | 6425 | CCUGAAUGGUAUGUGGUGA | 6484 | UCACCACAUACCAUUCAGG |
| ETD01732 | 6426 | CACAGUCCUAAAUGUGGCA | 6485 | UGCCACAUUUAGGACUGUG |
| ETD01733 | 6427 | CAAGCCGCAGUUCACGUUA | 6486 | UAACGUGAACUGCGGCUUG |
| ETD01734 | 6428 | UCUUCACGCGUGUCUCUGA | 6487 | UCAGAGACACGCGUGAAGA |
| ETD01789 | 6429 | ACUAUUGCCGGAAUCCUGA | 6488 | UCAGGAUUCCGGCAAUAGU |
| ETD01794 | 6430 | AUUCGACUACUGUGCCCUA | 6489 | UAGGGCACAGUAGUCGAAU |
| ETD01795 | 6431 | AGUUUGAGAAGUGUGGCAA | 6490 | UUGCCACACUUCUCAAACU |
| ETD01798 | 6432 | AUGACACAGUCCUAAAUGA | 6491 | UCAUUUAGGACUGUGUCAU |
| ETD01799 | 6433 | ACAAAACUUCUUGUCAGAA | 6492 | UUCUGACAAGAAGUUUUGU |
| ETD01800 | 6434 | ACUUCUUGUCAGACAUAAA | 6493 | UUUAUGUCUGACAAGAAGU |
| ETD01821 | 6435 | GGUCCUGGAAGGAAUUAUA | 6494 | UAUAAUUCCUUCCAGGACC |
| ETD01822 | 6436 | AACUUCUUGUCAGACAUAA | 6495 | UUAUGUCUGACAAGAAGUU |
| ETD01823 | 6437 | CUUCUUGUCAGACAUAAAA | 6496 | UUUUAUGUCUGACAAGAAG |
| ETD01826 | 6438 | CAACCAGGAGUGUAACAUA | 6497 | UAUGUUACACUCCUGGUUG |
| ETD01827 | 6439 | CUUCUUGUCAGACAUAAAU | 6498 | AUUUAUGUCUGACAAGAAG |
| ETD01828 | 6440 | CUUCUUGUCAGACAUAAAA | 6499 | UUUUAUGUCUGACAAGAAG |
| ETD01829 | 6441 | CUUCUUGUCAGACAUAAAA | 6500 | UUUUAUGUCUGACAAGAAG |
| ETD01830 | 6442 | CUUCUUGUCAGACAUAAAA | 6501 | UUUUAUGUCUGACAAGAAG |
| ETD01831 | 6443 | CUUCUUGUCAGACAUAAAG | 6502 | CUUUAUGUCUGACAAGAAG |
| ETD01832 | 6444 | GGUCCUGGAAGGAAUUAUA | 6503 | UAUAAUUCCUUCCAGGACC |
| ETD01833 | 6445 | GGUCCUGGAAGGAAUUAUA | 6504 | UAUAAUUCCUUCCAGGACC |
| ETD01834 | 6446 | GGUCCUGGAAGGAAUUAUA | 6505 | UAUAAUUCCUUCCAGGACC |
| ETD01835 | 6447 | GGUCCUGGAAGGAAUUAUA | 6506 | UAUAAUUCCUUCCAGGACC |
| ETD01836 | 6448 | GGUCCUGGAAGGAAUUAUA | 6507 | UAUAAUUCCUUCCAGGACC |
| ETD01837 | 6449 | GGUCCUGGAAGGAAUUAUU | 6508 | AAUAAUUCCUUCCAGGACC |
| ETD01860 | 6450 | GACAACUAUUGCCGGAAUA | 6509 | UAUUCCGGCAAUAGUUGUC |
| ETD01861 | 6451 | UGACACAGUCCUAAAUGUA | 6510 | UACAUUUAGGACUGUGUCA |
| ETD01862 | 6452 | AGUCCUAAAUGUGGCCUUA | 6511 | UAAGGCCACAUUUAGGACU |
| ETD01863 | 6453 | GAGUGUAACAUCAAGCACA | 6512 | UGUGCUUGAUGUUACACUC |
| ETD01864 | 6454 | GUGUAACAUCAAGCACCGA | 6513 | UCGGUGCUUGAUGUUACAC |
| ETD01865 | 6455 | AUUAUAAUCCCCAACCGAA | 6514 | UUCGGUUGGGGAUUAUAAU |
| ETD01866 | 6456 | UAUAAUCCCCAACCGAGUA | 6515 | UACUCGGUUGGGGAUUAUA |
| ETD01867 | 6457 | UCUUGUCAGACAUAAAGCA | 6516 | UGCUUUAUGUCUGACAAGA |
| ETD01868 | 6458 | UUGUCAGACAUAAAGCCAA | 6517 | UUGGCUUUAUGUCUGACAA |
| ETD01871 | 6459 | ACUUCUUGUCAGACAUAAA | 6518 | UUUAUGUCUGACAAGAAGU |
| ETD01872 | 6460 | ACUUCUUGUCAGACAUAAA | 6519 | UUUAUGUCUGACAAGAAGU |
| ETD01873 | 6461 | ACUUCUUGUCAGACAUAAA | 6520 | UUUAUGUCUGACAAGAAGU |
| ETD01874 | 6462 | ACUUCUUGUCAGACAUAAU | 6521 | AUUAUGUCUGACAAGAAGU |
| ETD01875 | 6463 | ACUUCUUGUCAGACAUAAA | 6522 | UUUAUGUCUGACAAGAAGU |
| ETD01876 | 6464 | ACUUCUUGUCAGACAUAAA | 6523 | UUUAUGUCUGACAAGAAGU |
| ETD01877 | 6465 | ACUUCUUGUCAGACAUAAA | 6524 | UUUAUGUCUGACAAGAAGU |
| ETD01878 | 6466 | ACUUCUUGUCAGACAUAAA | 6525 | UUUAUGUCUGACAAGAAGU |
| ETD01963 | 6467 | UCUUGUCAGACAUAAAGCA | 6526 | UGCUUUAUGUCUGACAAGA |
| ETD01964 | 6468 | UCUUGUCAGACAUAAAGCA | 6527 | UGCUUUAUGUCUGACAAGA |
| ETD01965 | 6469 | UCUUGUCAGACAUAAAGCA | 6528 | UGCUUUAUGUCUGACAAGA |
| ETD01966 | 6470 | UCUUGUCAGACAUAAAGCA | 6529 | UGCUUUAUGUCUGACAAGA |
| ETD01967 | 6471 | UUGUCAGACAUAAAGCCAA | 6530 | UUGGCUUUAUGUCUGACAA |
| ETD01968 | 6472 | UUGUCAGACAUAAAGCCAA | 6531 | UUGGCUUUAUGUCUGACAA |
| ETD01969 | 6473 | UUGUCAGACAUAAAGCCAA | 6532 | UUGGCUUUAUGUCUGACAA |
| ETD01970 | 6474 | UUGUCAGACAUAAAGCCAA | 6533 | UUGGCUUUAUGUCUGACAA |
| ETD01971 | 6475 | UUGUCAGACAUAAAGCCAA | 6534 | UUGGCUUUAUGUCUGACAA |
| ETD01972 | 6476 | UUGUCAGACAUAAAGCCAA | 6535 | UUGGCUUUAUGUCUGACAA |

TABLE 24C
Subset of Example siRNAs

| | SEQ | | SEQ | |
|---|---|---|---|---|
| siRNA | ID | Sense Strand Sequence (5′-3′) with | ID | |
| Name | NO: | GalNAc Moiety | NO: | Antisense Strand Sequence (5′-3′) |
| ETD01828 | 6208 | [ETL17]scuucUfUfgUfCfagacauaaaasusu | 6267 | usUfsuUfaUfgucugAfcAfaGfaAfgsusu |
| ETD01834 | 6214 | [ETL17]sgguccuGfGfAfAfGfgaauuauasusu | 6273 | usAfsuAfaUfuccuuCfcAfgGfaCfcsusu |
| ETD01835 | 6215 | [ETL17]sgguccuGfGfAfAfGfgaauuauasusu | 6274 | usAfsuAfauuCfcUfuCfcAfgGfaCfcsusu |
| ETD01836 | 6216 | [ETL17]sgguccuGfGfAfAfGfgaauuauasusu | 6275 | usAfsuAfauUfCfcUfuCfcAfgGfaCfcsus |
| | | | | u |
| ETD01873 | 6229 | [ETL17]sacuucuUfgUfCfagacauaaasusu | 6288 | usUfsuAfuGfuCfuGfaCfaAfgAfaGfusus |
| | | | | u |
| ETD01878 | 6234 | [ETL17]sacuuCfUfugUfCfagacauaaasusu | 6293 | usUfsuaugUfcuGfaCfaAfgAfaGfususu |
| ETD01966 | 6238 | [ETL17]sucuuGfucAfGfacauaaagcasusu | 6297 | usGfscUfuuAfugUfcUfgAfcAfaGfasusu |
| ETD01972 | 6244 | [ETL17]suuguCfagaCfaUfaaagccaasusu | 6303 | usUfsggCfuuuaUfgUfcUfgAfcAfasusu |

TABLE 24D
Base Sequences of Subset of Example siRNAs

| | SEQ | Base Sequence (5′-3′) | | Base Sequence (5′-3′) |
|---|---|---|---|---|
| SiRNA | ID | of Sense Strand, | SEQ | of Antisense Strand, |
| Name | NO: | Without 3′ Overhang | ID NO: | Without 3′ Overhang |
| ETD01828 | 6440 | CUUCUUGUCAGACAUAAAA | 6499 | UUUUAUGUCUGACAAGAAG |
| ETD01834 | 6446 | GGUCCUGGAAGGAAUUAUA | 6505 | UAUAAUUCCUUCCAGGACC |
| ETD01835 | 6447 | GGUCCUGGAAGGAAUUAUA | 6506 | UAUAAUUCCUUCCAGGACC |
| ETD01836 | 6448 | GGUCCUGGAAGGAAUUAUA | 6507 | UAUAAUUCCUUCCAGGACC |
| ETD01873 | 6461 | ACUUCUUGUCAGACAUAAA | 6520 | UUUAUGUCUGACAAGAAGU |
| ETD01878 | 6466 | ACUUCUUGUCAGACAUAAA | 6525 | UUUAUGUCUGACAAGAAGU |
| ETD01966 | 6470 | UCUUGUCAGACAUAAAGCA | 6529 | UGCUUUAUGUCUGACAAGA |
| ETD01972 | 6476 | UUGUCAGACAUAAAGCCAA | 6535 | UUGGCUUUAUGUCUGACAA |

[0352] The sense strands of the example siRNAs in Table 24A each include a GalNAc moiety as indicated. In Table 24A and Table 24C, Nf (e.g. Af, Cf, Gf, Tf, or Uf) is a 2′ fluoro-modified nucleoside, dN (e.g. dA, dC, dG, dT, or dU) is a 2′ deoxy-modified nucleoside, n (e.g. a, c, g, t, or u) is a 2′ O-methyl modified nucleoside, and “s” is a phosphorothioate linkage.

### Example 15: Inhibition of MST1 in a Mouse Model of Lung Inflammation Via LPS Exposure Using MST1 siRNAs

[0353] In this experiment, a mouse model of lung inflammation induced by acute LPS exposure was used to evaluate the effect of siRNA inhibition of MST1. In this LPS induced model, mice were exposed to LPS for 6 hours which will resulted in a transient inflammatory response. Lung inflammation was assessed by measuring neutrophils, macrophages, eosinophils, lymphocytes and cytokines in bronchoalveolar lavage fluid and lung tissue.

[0354] Briefly, mice were divided into five groups: Group 1—a group treated with vehicle and saline intratracheal instillation, Group 2—a group treated with vehicle and LPS intratracheal instillation, Group 3—a group treated with low dose MST1 siRNA ETD01218 (50 ug) and LPS intratracheal instillation, Group 4—a group treated with high dose MST1 siRNA ETD01218 (150 ug) and LPS intratracheal instillation, Group 5—a group treated with Betamethasone and LPS intratracheal instillation. Each group contained twelve mice (male). The sequence of ETD01218 is shown in Table 29.

[0355] Administration of siRNA was achieved with a 100 μL subcutaneous injection of siRNA resuspended in PBS at concentrations of 0.5 mg/ml or 1.5 mg/ml. Administration of 3 mg/kg Betamethasone was achieved via oral gavage with Betamethasone resuspended in PBS at a concentration of 0.3 mg/ml. At days −21, −14, and −7, Group 1 mice were injected subcutaneously with vehicle, Group 2 mice were injected subcutaneously with vehicle, Group 3 mice were injected subcutaneously with low dose MST1 siRNA ETD01218 targeting mouse MST1, Group 4 mice were injected subcutaneously with high dose MST1 siRNA ETD01218 targeting mouse MST1, and Group 5 mice were injected subcutaneously with vehicle. On Day 1, 30 minutes prior to LPS administration, Group 5 mice were dosed with Betamethasone via oral gavage.

[0356] On Day 1, 6 hours after LPS administration, bronchoalveolar lavage fluid was collected and the mice were euthanized by isoflurane inhalation and exsanguination of abdominal aorta. Final blood samples were collected, and livers and lungs are removed, and a section placed in RNAlater for mRNA isolation.

[0357] Mice were sacrificed on Day 1, 6 hours after LPS administration, and a liver and lung samples from each was collected and placed in RNAlater (ThermoFisher Cat #AM7020) until processing. Total liver RNA was prepared by homogenizing the liver tissue in homogenization buffer (Maxwell RSC simplyRNA Tissue Kit) using a Percellys 24 tissue homogenizer (Bertin Instruments) set at 5000 rpm for two 10 second cycles. Total RNA from the lysate was purified on a Maxwell RSC 48 platform (Promega Corporation) according to the manufacturer's recommendations. Preparation of cDNA was performed using Quanta qScript cDNA SuperMix (VWR, Catalog #95048-500) according to the manufacturer's instructions. The relative levels of liver MST1 mRNA were assessed by RT-qPCR in triplicate on a QuantStudio™ 6 Pro Real-Time PCR System using TaqMan assays for mouse MST1 (ThermoFisher, assay #Mm01229834_ml) and the mouse housekeeping gene PPIA (ThermoFisher, assay #Mm02342430_g1) and PerfeCTa® qPCR FastMix®, Low ROX™ (VWR, Catalog #101419-222). Data were normalized to the level in animals receiving vehicle and LPS intratracheal instillation. MST1 mRNA expression in the liver tissue from mice dosed with the MST1 siRNA and administered LPS was reduced by 85% and 98%, low and high dose MST1 siRNA respectively, compared to MST1 mRNA expression in the liver tissue from mice dosed with the vehicle and administered LPS (Table 25). MSP protein in the liver tissue from mice dosed with the MST1 siRNA and administered LPS was reduced from 8.94 ng/ml to 1.71 ng/ml in the low dose MST1 siRNA and to 0.53 ng/ml in the high dose MST1 siRNA. This equates to an 81% and 94% reduction, low and high dose MST1 siRNA respectively, compared to MSP protein in the liver tissue from mice dosed with the vehicle and administered LPS (Table 25). MSP protein in the serum from mice dosed with the MST1 siRNA and administered LPS was reduced by ˜80% and ˜90%, low and high dose MST1 siRNA respectively, compared to MSP protein in the serum from mice dosed with the vehicle and administered LPS (Table 26). The high dose MST1 siRNA decreased in neutrophil, eosinophils and lymphocytes counts, 45%, 30%, and 48%, respectively, in the bronchoalveolar lavage fluid in LPS exposed mice compared to the neutrophil, eosinophils and lymphocytes counts in the bronchoalveolar lavage fluid in LPS exposed mice that receive the vehicle control (Table 27). Whereas, the low dose MST1 siRNA is able to decrease in neutrophil, eosinophils and lymphocytes counts, 42%, 40%, and 14%, respectively, in the bronchoalveolar lavage fluid in LPS exposed mice compared to the neutrophil, eosinophils and lymphocytes counts in the bronchoalveolar lavage fluid in LPS exposed mice that receive the vehicle control (Table 27). The ability of the MST1 siRNAs to lower the neutrophil, eosinophils and lymphocytes counts was comparable to the positive control Betamethasone which is able to decrease in neutrophil, eosinophils and lymphocytes counts, 48%, 32%, and 41%, respectively, in the bronchoalveolar lavage fluid in LPS exposed mice compared to the neutrophil, eosinophils and lymphocytes counts in the bronchoalveolar lavage fluid in LPS exposed mice that receive the vehicle control (Table 27). Additionally, MST1 siRNA, as well as the positive control Betamethasone, was able to reduce the pro-inflammatory cytokines, IL-1b, IL-6. KC-GRO, MCP-1 and TNF-α (Table 28). These results show that the MST1 siRNA elicited knockdown of MST1 mRNA and MSP in liver tissue and reduced circulating MSP in serum, and that the decrease in MST1 mRNA and MSP expression corresponds with a decrease in neutrophil, eosinophils and lymphocytes counts and associated cytokines in the bronchoalveolar lavage fluid in mice exposed to LPS.

TABLE 25

| | | | siRNA | siRNA | |
|---|---|---|---|---|---|
| | | | MST1 | MST1 | |
| | Vehicle | Vehicle | 50 ug | 150 ug | Betamethasone |
| | PBS | LPS | | | |
| MST1 Liver | 2.54 | 1.12 | 0.17 | 0.08 | 0.73 |
| mRNA relative | | | | | |
| expression | | | | | |
| MSP Liver | 10.28 | 8.94 | 1.71 | 0.53 | 6.73 |
| protein [ng/ml] | | | | | |

TABLE 26

| | | | | siRNA | siRNA | |
|---|---|---|---|---|---|---|
| | | | | MST1 | MST1 | Beta- |
| | | Vehicle | Vehicle | 50 ug | 150 ug | methasone |
| | | PBS | LPS | | | |
| MSP Serum | Day −21 | 3.85 | 3.52 | 3.52 | 4.32 | 3.60 |
| protein | Day −2 | 4.41 | 4.36 | 0.77 | 0.32 | 4.60 |
| [ng/ml] | Day 1 | 4.95 | 4.23 | 0.91 | 0.39 | 5.23 |

TABLE 27

| | | | | siRNA | siRNA | |
|---|---|---|---|---|---|---|
| | | | | MST1 | MST1 | Beta- |
| | | Vehicle | Vehicle | 50 ug | 150 ug | methasone |
| | | PBS | LPS | | | |
| BAL | Neutrophil | 76.75 | 317.30 | 213.80 | 172.70 | 164.50 |
| Cell | Macrophage | 56.67 | 37.67 | 44.17 | 36.42 | 32.75 |
| Counts | Eosinophil | 4.82 | 2.82 | 1.67 | 2.00 | 1.91 |
| | Lymphocyte | 7.42 | 7.25 | 6.25 | 4.46 | 4.27 |

TABLE 28

| | | | siRNA | siRNA | |
|---|---|---|---|---|---|
| | | | MST1 | MST1 | Beta- |
| | Vehicle | Vehicle | 50 ug | 150 ug | methasone |
| | PBS | LPS | | | |
| GM-CSF | 50 | 284 | 98.79 | 272.7 | 50 |
| IL-1b | 32 | 55.79 | 32 | 32 | 32 |
| IL-6 | 317.8 | 8473 | 5071 | 4530 | 620.1 |
| KC-GRO | 229.1 | 9001 | 7342 | 7641 | 3721 |
| MCP-1 | 8 | 485.4 | 336.7 | 369.1 | 8 |
| TNF-a | 30.61 | 5174 | 3677 | 3019 | 211.2 |

TABLE 29
Example siRNA Sequences

| | SEQ | sense strand | SEQ | |
|---|---|---|---|---|
| SiRNA | ID | sequence | ID | antisense strand |
| Name | NO: | (5′-3′) | NO: | sequence (5′-3′) |
| ETD01218 | 6317 | [ETL1]cscsug | 6318 | usCfsauuGfuccaua |
| | | CfaUfuAfugga | | aUfgCfaggsusu |
| | | caaugasusu | | |

### Example 16: Inhibition of MST1 in a Non-human Primates Using MST1 siRNAs

[0358] In this experiment, non-human primates will be used to evaluate the efficacy of siRNA inhibition of MST1.

[0359] Briefly, cynomolgus monkeys, will be divided into 4 groups: Group 1—this group will be treated with siRNA ETD01821, Group 2—this group will be treated with siRNA ETD01822, Group 3—this group treated with siRNA ETD01823, and Group 4—this group will be treated with siRNA ETD01826. These siRNAs are shown in Table 30. Their sequences are included in Table 24A, and these siRNAs were derivatives of ETD01728, ED01725, ETD01723 and ETD01729, respectively. Each group will contain three cynomolgus monkeys (males).

[0360] Administration of siRNA will be achieved with a 1 mL subcutaneous injection of siRNA resuspended in PBS at concentration of 25 mg/ml. At Day 0, Group 1 cynomologus monkeys will be injected subcutaneously with siRNA ETD01723, Group 2 cynomologus monkeys will be injected subcutaneously with siRNA ETD01725, Group 3 cynomologus monkeys will be injected subcutaneously with siRNA ETD01728, and Group 4 cynomologus monkeys will be injected subcutaneously with siRNA ETD01729.

[0361] 2 days prior to siRNA administration, liver biopsies will be collected along with serum samples. On Day 28, final liver biopsies and blood samples will be collected and the livers sections placed in RNAlater for mRNA isolation.

[0362] Total liver RNA will be isolated from tissue and placed in RNAlater solution using the PureLink kit according to the manufacturer's protocol (ThermoFisher Cat. No. 12183020). The reverse transcriptase reaction is performed according to the manufacturer's protocol. Samples are stored at −80° C. until real-time qPCR is performed in triplicate using TaqMan Gene Expression Assays TaqMan assays for cynomolgus MST1 (ThermoFisher, assay #Mf02878573_g1) and the cynomolgus housekeeping gene GAPDH (ThermoFisher, assay #Mf04392546_g1). A decrease in MST1 mRNA in the liver tissue and circulating MSP in the serum from cynomologus monkeys dosed with the MST1 siRNA1 is expected compared to MST1 mRNA or MSP expression in the liver tissue and circulating MSP in the blood from samples taken prior to dosing. These results are expected to show that the MST1 siRNA elicits knockdown of MST1 mRNA and and reduces circulating MSP in non-human primates.

TABLE 30
Example siRNAs
SIRNA Name
ETD01821
ETD01822
ETD01823
ETD01826

### Example 18: GalNAc Ligand for Hepatocyte Targeting of Oligonucleotides

[0363] Without limiting the disclosure to these individual methods, there are at least two general methods for attachment of multivalent N-acetylgalactosamine (GalNAc) ligands to oligonucleotides: solid or solution-phase conjugations. GalNAc ligands may be attached to solid phase resin for 3′ conjugation or at the 5′ terminus using GalNAc phosphoramidite reagents. GalNAc phosphoramidites may be coupled on solid phase as for other nucleosides in the oligonucleotide sequence at any position in the sequence. Reagents for GalNAc conjugation to oligonucleotides are shown in Table 31.

### Example 17: Oligonucleotide Synthesis

[0364] Oligonucleotides such as siRNAs may be synthesized according to phosphoramidite technology on a solid phase. For example, a K&A oligonucleotide synthesizer may be used. Syntheses may be performed on a solid support made of controlled pore glass (CPG, 500 Å or 600 Å, obtained from AM Chemicals, Oceanside, CA, USA). All 2′-OMe and 2′-F phosphoramidites may be purchased from Hongene Biotech (Union City, CA, USA). All phosphoramidites may be dissolved in anhydrous acetonitrile (100 mM) and molecular sieves (3 Å) may be added. 5-Benzylthio-1H-tetrazole (BTT, 250 mM in acetonitrile) or 5-Ethylthio-1H-tetrazole (ETT, 250 mM in acetonitrile) may be used as activator solution. Coupling times may be 9-18 min (e.g. with a GalNAc such as ETL17), 6 min (e.g. with 2′OMe and 2′F). In order to introduce phosphorothioate linkages, a 100 mM solution of 3-phenyl 1,2,4-dithiazoline-5-one (POS, obtained from PolyOrg, Inc., Leominster, Mass., USA) in anhydrous acetonitrile may be employed.

[0365] After solid phase synthesis, the dried solid support may be treated with a 1:1 volume solution of 40 wt. % methylamine in water and 28% ammonium hydroxide solution (Aldrich) for two hours at 30° C. The solution may be evaporated and the solid residue may be reconstituted in water and purified by anionic exchange HPLC using a TKSgel SuperQ-5PW 13u column. Buffer A may be 20 mM Tris, 5 mM EDTA, pH 9.0 and contained 20% Acetonitrile and buffer B may be the same as buffer A with the addition of 1 M sodium chloride. UV traces at 260 nm may be recorded. Appropriate fractions may be pooled then desalted using Sephadex G-25 medium.

[0366] Equimolar amounts of sense and antisense strand may be combined to prepare a duplex. The duplex solution may be prepared in 0.1×PBS (Phosphate-Buffered Saline, 1×, Gibco). The duplex solution may be annealed at 95° C. for 5 min, and cooled to room temperature slowly. Duplex concentration may be determined by measuring the solution absorbance on a UV-Vis spectrometer at 260 nm in 0.1×PBS. For some experiments, a conversion factor may be calculated from an experimentally determined extinction coefficient.

TABLE 31
GalNAc Conjugation Reagents

| Type of conjugation | Structure |
|---|---|
| Solid phase 3′ attachment where squiggly line is rest of oligonucleotide chain and right-most OH is where attachment' to solid phase is. | [chemical structure] |
| | This GalNAc ligand may be referred to as “GalNAc23” or “GalNAc#23.” |
| Solid phase 5′ attachment phosphoramidite | [chemical structure] |
| Solid phase 5′ attachment Phosphoramidite | [chemical structure] |
| Solution phase Carboxylic acid for amide coupling anywhere on oligonucleotide | [chemical structure] |
| | Where Ac is an acetyl group or other hydroxyl protecting group that can be removed under |
| | basic, acid or reducing conditions. |

[0367] In solution phase conjugation, the oligonucleotide sequence—including a reactive conjugation site—is formed on the resin. The oligonucleotide is then removed from the resin and GalNAc is conjugated to the reactive site.

[0368] The carboxy GalNAc derivatives may be coupled to amino-modified oligonucleotides. The peptide coupling conditions are known to the skilled in the art using a carbodiimide coupling agent like DCC (N,N′-Dicyclohexylcarbodiimide), EDC (N-(3-dimethylaminopropyl)-N′-ethylcarbodiimide) or EDC·HCl (N-(3-dimethylaminopropyl)-N′-ethylcarbodiimide hydrochloride and an additive like HOBt (1-hydroxybenztriazole), HOSu (N-hydroxysuccinimide), TBTU (N,N,N′,N′-Tetramethyl-O-(benzotriazol-1-yl)uronium tetrafluoroborate, HBTU (2-(1H-benzotriazol-1-yl)-1,1,3,3-tetramethyluronium hexafluorophosphate) or HOAt (1-Hydroxy-7-azabenzotriazole and common combinations thereof such as TBTU/HOBt or HBTU/HOAt to form activated amine-reactive esters.

[0369] Amine groups may be incorporated into oligonucleotides using a number of known, commercially available reagents at the 5′ terminus, 3′ terminus or anywhere in between.

[0370] Non-limiting examples of reagents for oligonucleotide synthesis to incorporate an amino group include:
[0371] 5′ attachment:
[0372] 6-(4-Monomethoxytritylamino)hexyl-(2-cyanoethyl)-(N,N-diisopropyl)-phosphoramidite CAS Number: 114616-27-2
[0373] 5′-Amino-Modifier TEG CE-Phosphoramidite
[0374] 10-(O-trifluoroacetamido-N-ethyl)-triethyleneglycol-1-[(2-cyanoethyl)-(N,N-diisopropyl)]-phosphoramidite
[0375] 3′ attachment:
[0376] 3′-Amino-Modifier Serinol CPG
[0377] 3-Dimethoxytrityloxy-2-(3-(fluorenylmethoxycarbonylamino)propanamido)propyl-1-O-succinyl-long chain alkylamino-CPG (where CPG stands for controlled-pore glass and is the solid support)
[0378] Amino-Modifier Serinol Phosphoramidite
[0379] 3-Dimethoxytrityloxy-2-(3-(fluorenylmethoxycarbonylamino)propanamido)propyl-1-O-(2-cyanoethyl)-(N,N-diisopropyl)-phosphoramidite

[0380] Internal (base modified):
[0381] Amino-Modifier C6 dT
[0382] 5′-Dimethoxytrityl-5-[N-(trifluoroacetylaminohexyl)-3-acrylimido]-2′-deoxyUridine,3′-[(2-cyanoethyl)-(N,N-diisopropyl)]-phosphoramidite. CAS Number: 178925-21-8

[0383] Solution phase conjugations may occur after oligonucleotide synthesis via reactions between non-nucleosidic nucleophilic functional groups that are attached to the oligonucleotide and electrophilic GalNAc reagents. Examples of nucleophilic groups include amines and thiols, and examples of electrophilic reagents include activated esters (e.g. N-hydroxysuccinimide, pentafluorophenyl) and maleimides.

### Example 19: GalNAc Ligands for Hepatocyte Targeting of Oligonucleotides

[0384] Without limiting the disclosure to these individual methods, there are at least two general methods for attachment of multivalent N-acetylgalactosamine (GalNAc) ligands to oligonucleotides: solid or solution-phase conjugations. GalNAc ligands may be attached to solid phase resin for 3′ conjugation or at the 5′ terminus using GalNAc phosphoramidite reagents. GalNAc phosphoramidites may be coupled on solid phase as for other nucleosides in the oligonucleotide sequence at any position in the sequence. A non-limiting example of a phosphoramidite reagent for GalNAc conjugation to a 5′ end oligonucleotide is shown in Table 32.

TABLE 32
GalNAc Conjugation Reagent

| Type of | |
|---|---|
| conjugation | Structure |
| Solid phase 5′ attachment phosphoramidite | [chemical structure] |

[0385] The following includes examples of synthesis reactions used to create a GalNAc moiety:

[chemical structure]

[chemical structure]

### General Procedure for Preparation of Compound 2A

[chemical structure]

[0387] To a solution of Compound 1A (500 g, 4.76 mol, 476 mL) in 2-Methyl-THF (2.00 L) is added CbzCl (406 g, 2.38 mol, 338 mL) in 2-Methyl-THF (750 mL) dropwise at 0° C. The mixture is stirred at 25° C. for 2 hrs under N₂ atmosphere. TLC (DCM:MeOH=20:1, PMA) may indicate CbzCl is consumed completely and one new spot (R_{f}=0.43) formed. The reaction mixture is added HCl/EtOAc (1 N, 180 mL) and stirred for 30 mins, white solid is removed by filtration through celite, the filtrate is concentrated under vacuum to give Compound 2A (540 g, 2.26 mol, 47.5% yield) as a pale yellow oil and used into the next step without further purification. ¹H NMR: δ 7.28-7.41 (m, 5H), 5.55 (br s, 1H), 5.01-5.22 (m, 2H), 3.63-3.80 (m, 2H), 3.46-3.59 (m, 4H), 3.29-3.44 (m, 2H), 2.83-3.02 (m, 1H).

### General Procedure for Preparation of Compound 4A

[chemical structure]

[0389] To a solution of Compound 3A (1.00 kg, 4.64 mol, HCl) in pyridine (5.00 L) is added acetyl acetate (4.73 kg, 46.4 mol, 4.34 L) dropwise at 0° C. under N₂ atmosphere. The mixture is stirred at 25° C. for 16 hrs under N₂ atmosphere. TLC (DCM:MeOH=20:1, PMA) indicated Compound 3A is consumed completely and two new spots (R_{f}=0.35) formed. The reaction mixture is added to cold water (30.0 L) and stirred at 0° C. for 0.5 hr, white solid formed, filtered and dried to give Compound 4A (1.55 kg, 3.98 mol, 85.8% yield) as a white solid and used in the next step without further purification. ¹H NMR: δ 7.90 (d, J=9.29 Hz, 1H), 5.64 (d, J=8.78 Hz, 1H), 5.26 (d, J=3.01 Hz, 1H), 5.06 (dd, J=11.29, 3.26 Hz, 1H), 4.22 (t, J=6.15 Hz, 1H), 3.95-4.16 (m, 3H), 2.12 (s, 3H), 2.03 (s, 3H), 1.99 (s, 3H), 1.90 (s, 3H), 1.78 (s, 3H).

### General Procedure for Preparation of Compound 5A

[chemical structure]

[0391] To a solution of Compound 4A (300 g, 771 mmol) in DCE (1.50 L) is added TMSOTf (257 g, 1.16 mol, 209 mL) and stirred for 2 hrs at 60° C., and then stirred for 1 hr at 25° C. Compound 2A (203 g, 848 mmol) is dissolved in DCE (1.50 L) and added 4A powder molecular sieves (150 g) stirring for 30 mins under N₂ atmosphere. Then the solution of Compound 4A in DCE is added dropwise to the mixture at 0° C. The mixture is stirred at 25° C. for 16 hrs under N₂ atmosphere. TLC (DCM:MeOH=25:1, PMA) indicated Compound 4A is consumed completely and new spot (R_{f}=0.24) formed. The reaction mixture is filtered and washed with sat. NaHCO₃ (2.00 L), water (2.00 L) and sat. brine (2.00 L). The organic layer is dried over anhydrous Na₂SO4, filtered and concentrated under reduced pressure to give a residue. The residue is triturated with 2-Me-THE/heptane (5/3, v/v, 1.80 L) for 2 hrs, filtered and dried to give Compound 5A (225 g, 389 mmol, 50.3% yield, 98.4% purity) as a white solid. ¹H NMR: δ 7.81 (d, J 9.29 Hz, 1H), 7.20-7.42 (m, 6H), 5.21 (d, J=3.26 Hz, 1H), 4.92-5.05 (m, 3H), 4.55 (d, J=8.28 Hz, 1H), 3.98-4.07 (m, 3H), 3.82-3.93 (m, 1H), 3.71-3.81 (m, 1H), 3.55-3.62 (m, 1H), 3.43-3.53 (m, 2H), 3.37-3.43 (m, 2H), 3.14 (q, J=5.77 Hz, 2H), 2.10 (s, 3H), 1.99 (s, 3H), 1.89 (s, 3H), 1.77 (s, 3H).

### General Procedure for Preparation of NAcegal-Linker-Tosylate Salt

[chemical structure]

[0393] To a solution of Compound 5A (200 g, 352 mmol) in THF (1.0 L) is added dry Pd/C (15.0 g, 10% purity) and TsOH (60.6 g, 352 mmol) under N₂ atmosphere. The suspension is degassed under vacuum and purged with H₂ several times. The mixture is stirred at 25° C. for 3 hrs under H₂ (45 psi) atmosphere. TLC (DCM:MeOH=10:1, PMA) indicated Compound 5A is consumed completely and one new spot (R_{f}=0.04) is formed. The reaction mixture is filtered and concentrated (≤40° C.) under reduced pressure to give a residue. Diluted with anhydrous DCM (500 mL, dried overnight with 4 Å molecular sieves (dried at 300° C. for 12 hrs)) and concentrate to give a residue and run Karl Fisher (KF) to check for water content. This is repeated 3 times with anhydrous DCM (500 mL) dilutions and concentration to give NAcegal-Linker-TMSOTf (205 g, 95.8% yield, TsOH salt) as a foamy white solid. ¹H NMR: δ 7.91 (d, J=9.03 Hz, 1H), 7.53-7.86 (m, 2H), 7.49 (d, J=8.03 Hz, 2H), 7.13 (d, J=8.03 Hz, 2H), 5.22 (d, J 3.26 Hz, 1H), 4.98 (dd, J=11.29, 3.26 Hz, 1H), 4.57 (d, J=8.53 Hz, 1H), 3.99-4.05 (m, 3H), 3.87-3.94 (m, 1H), 3.79-3.85 (m, 1H), 3.51-3.62 (m, 5H), 2.96 (br t, J=5.14 Hz, 2H), 2.29 (s, 3H), 2.10 (s, 3H), 2.00 (s, 3H), 1.89 (s, 3H), 1.78 (s, 3H).

[chemical structure]

[chemical structure]

### General Procedure for Preparation of Compound 5B

[chemical structure]

[0395] To a solution of Compound 4B (400 g, 1.67 mol, 1.00 eq) and NaOH (10 M, 16.7 mL, 0.10 eq) in THF (2.00 L) is added Compound 4B_2 (1.07 kg, 8.36 mol, 1.20 L, 5.00 eq), the mixture is stirred at 30° C. for 2 hrs. LCMS showed the desired MS is given. Five batches of solution are combined to one batch, then the mixture is diluted with water (6.00 L), extracted with ethyl acetate (3.00 L*3), the combined organic layer is washed with brine (3.00 L), dried over Na₂SO₄, filtered and concentrated under vacuum. The crude is purified by column chromatography (SiO₂, petroleum ether:ethyl acetate=100:1-10:1, R_{f}=0.5) to give Compound 5B (2.36 kg, 6.43 mol, 76.9% yield) as light yellow oil. HNMR: δ 7.31-7.36 (m, 5H), 5.38 (s, 1H), 5.11-5.16 (m, 2H), 3.75 (t, J=6.4 Hz), 3.54-3.62 (m, 6H), 3.39 (d, J=5.2 Hz), 2.61 (t, J=6.0 Hz).

General Procedure for Preparation of 3-oxo-1-phenyl-2,7,10-trioxa-4-azatridecan-13-oic acid (Compound 2B Below)

[chemical structure]

[0396] To a solution of Compound 5B (741 g, 2.02 mol, 1.00 eq) in DCM (2.80 L) is added TFA (1.43 kg, 12.5 mol, 928 mL, 6.22 eq), the mixture is stirred at 25° C. for 3 hrs. LCMS showed the desired MS is given. The mixture is diluted with DCM (5.00 L), washed with water (3.00 L*3), brine (2.00 L), the combined organic layer is dried over Na₂SO₄, filtered and concentrated under vacuum to give Compound 2B (1800 g, crude) as light yellow oil. HNMR: δ 9.46 (s, 5H), 7.27-7.34 (m, 5H), 6.50-6.65 (m, 1H), 5.71 (s, 1H), 5.10-5.15 (m, 2H), 3.68-3.70 (m, 14H), 3.58-3.61 (m, 6H), 3.39 (s, 2H), 2.55 (s, 6H), 2.44 (s, 2H).

### General Procedure for Preparation of Compound 3B

[chemical structure]

[0398] To a solution of Compound 2B (375 g, 999 mmol, 83.0% purity, 1.00 eq) in DCM (1.80 L) is added HATU (570 g, 1.50 mol, 1.50 eq) and DIEA (258 g, 2.00 mol, 348 mL, 2.00 eq) at 0° C., the mixture is stirred at 0° C. for 30 min, then Compound 1B (606 g, 1.20 mol, 1.20 eq) is added, the mixture is stirred at 25° C. for 1 hr. LCMS showed desired MS is given. The mixture is combined to one batch, then the mixture is diluted with DCM (5.00 L), washed with 1 N HCl aqueous solution (2.00 L*2), then the organic layer is washed with saturated Na₂CO₃ aqueous solution (2.00 L*2) and brine (2.00 L), the organic layer is dried over Na₂SO₄, filtered and concentrated under vacuum to give Compound 3B (3.88 kg, crude) as yellow oil.

### General Procedure for Preparation of TRIS-PEG2-CBZ.

[chemical structure]

[0400] A solution of Compound 3B (775 g, 487 mmol, 50.3% purity, 1.00 eq) in HCl/dioxane (4 M, 2.91 L, 23.8 eq) is stirred at 25° C. for 2 hrs. LCMS showed the desired MS is given. The mixture is concentrated under vacuum to give a residue. Then the combined residue is diluted with DCM (5.00 L), adjusted to pH=8 with 2.5 M NaOH aqueous solution, and separated. The aqueous phase is extracted with DCM (3.00 L) again, then the aqueous solution is adjusted to pH=3 with 1 N HCl aqueous solution, then extracted with DCM (5.00 L*2), the combined organic layer is washed with brine (3.00 L), dried over Na₂SO₄, filtered and concentrated under vacuum. The crude is purified by column chromatography (SiO₂, DCM:MeOH=0:1-12:1, 0.1% HOAc, R_{f}=0.4). The residue is diluted with DCM (5.00 L), adjusted to pH=8 with 2.5 M NaOH aqueous solution, separated, the aqueous solution is extracted with DCM (3.00 L) again, then the aqueous solution is adjusted to pH=3 with 6 N HCl aqueous solution, extracted with DCM:MeOH=10:1 (5.00 L*2), the combined organic layer is washed with brine (2.00 L), dried over Na₂SO₄, filtered and concentrated under vacuum to give a residue. Then the residue is diluted with MeCN (5.00 L), concentrated under vacuum, repeat this procedure twice to remove water to give TRIS-PEG2-CBZ (1.25 kg, 1.91 mol, 78.1% yield, 95.8% purity) as light yellow oil. ¹HNMR: 400 MHz, MeOD, δ 7.30-7.35 (5H), 5.07 (s, 2H), 3.65-3.70 (m, 16H), 3.59 (s, 4H), 3.45 (t, J=5.6 Hz), 2.51 (t, J=6.0 Hz), 2.43 (t, 6.4 Hz).

[chemical structure]

[chemical structure]

[chemical structure]

[chemical structure]

### General Procedure for Preparation of Compound 3C

[chemical structure]

[0402] To a solution of Compound 1C (155 g, 245 mmol, 1.00 eq) in ACN (1500 mL) is added TBTU (260 g, 811 mmol, 3.30 eq), DIEA (209 g, 1.62 mol, 282 mL, 6.60 eq) and Compound 2C (492 g, 811 mmol, 3.30 eq, TsOH) at 0° C., the mixture is stirred at 15° C. for 16 hrs. LCMS showed the desired MS is given. The mixture is concentrated under vacuum to give a residue, then the mixture is diluted with DCM (2000 mL), washed with 1 N HCl aqueous solution (700 mL*2), then saturated NaHCO₃ aqueous solution (700 mL*2) and concentrated under vacuum. The crude is purified by column chromatography to give Compound 3C (304 g, 155 mmol, 63.1% yield, 96.0% purity) as a yellow solid.

### General Procedure for Preparation of Compound 4C

[chemical structure]

[0404] Two batches solution of Compound 3C (55.0 g, 29.2 mmol, 1.00 eq) in MeOH (1600 mL) is added Pd/C (6.60 g, 19.1 mmol, 10.0% purity) and TFA (3.34 g, 29.2 mmol, 2.17 mL, 1.00 eq), the mixture is degassed under vacuum and purged with H₂. The mixture is stirred under H₂ (15 psi) at 15° C. for 2 hours. LCMS showed the desired MS is given. The mixture is filtered and the filtrate is concentrated under vacuum to give Compound 4C (106 g, 54.8 mmol, 93.7% yield, 96.2% purity, TFA) as a white solid.

### General Procedure for Preparation of Compound 5C

[chemical structure]

[0406] Two batches in parallel. To a solution of EDCI (28.8 g, 150 mmol, 1.00 eq) in DCM (125 mL) is added compound 4a (25.0 g, 150 mmol, 1.00 eq) dropwise at 0° C., then the mixture is added to compound 4 (25.0 g, 150 mmol, 1.00 eq) in DCM (125 mL) at 0° C., then the mixture is stirred at 25° C. for 1 hr. TLC (Petroleum ether:Ethyl acetate=3:1, R_{f}=0.45) showed the reactant is consumed and one new spot is formed. The reaction mixture is diluted with DCM (100 mL) then washed with aq·NaHCO₃ (250 mL*1) and brine (250 mL), dried over Na₂SO₄, filtered and concentrated under reduced pressure to give a residue. The residue is purified by column chromatography (SiO₂, Petroleum ether:Ethyl acetate=100:1 to 3:1), TLC (SiO₂, Petroleum ether:Ethyl acetate=3:1), R_{f}=0.45, then concentrated under reduced pressure to give a residue. Compound 5C (57.0 g, 176 mmol, 58.4% yield, 96.9% purity) is obtained as colorless oil and confirmed ¹HNMR: EW33072-2-P1A, 400 MHz, DMSO δ 9.21 (s, 1H), 7.07-7.09 (m, 2H), 6.67-6.70 (m, 2H), 3.02-3.04 (m, 2H), 2.86-2.90 (m, 2H)

### General Procedure for Preparation of Compound 6

[chemical structure]

[0408] To a mixture of compound 3 (79.0 g, 41.0 mmol, 96.4% purity, 1.00 eq, TFA) and compound 6C (14.2 g, 43.8 mmol, 96.9% purity, 1.07 eq) in DCM (800 mL) is added TEA (16.6 g, 164 mmol, 22.8 mL, 4.00 eq) dropwise at 0° C., the mixture is stirred at 15° C. for 16 hrs. LCMS (EW33072-12-P1B, Rt=0.844 min) showed the desired mass is detected. The reaction mixture is diluted with DCM (400 mL) and washed with aq·NaHCO₃ (400 mL*1) and brine (400 mL*1), then the mixture is diluted with DCM (2.00 L) and washed with 0.7 M Na₂CO₃ (1000 mL*3) and brine(800 mL*3), dried over Na₂SO₄, filtered and concentrated under reduced pressure to give a residue. The residue is used to next step directly without purification. Compound 6 (80.0 g, crude) is obtained as white solid and confirmed via ¹HNMR: EW33072-12-P1A, 400 MHz, MeOD δ 7.02-7.04 (m, 2H), 6.68-6.70 (m, 2H), 5.34-5.35 (s, 3H), 5.07-5.08 (d, J=4.00 Hz, 3H), 4.62-4.64 (d, J=8.00 Hz, 3H), 3.71-4.16 (m, 16H), 3.31-3.70 (m, 44H), 2.80-2.83 (m, 2H), 2.68 (m, 2H), 2.46-2.47 (m, 10H), 2.14 (s, 9H), 2.03 (s, 9H), 1.94-1.95 (d, J=4.00 Hz, 18H).

### General Procedure for Preparation of TriGNal-TRIS-Peg2-Phosph 8c

[chemical structure]

[0410] Two batches are synthesized in parallel. To a solution of compound 6C (40.0 g, 21.1 mmol, 1.00 eq in DCM (600 mL) is added diisopropylammonium tetrazolide (3.62 g, 21.1 mmol, 1.00 eq) and compound 7c (6.37 g, 21.1 mmol, 6.71 mL, 1.00 eq) in DCM (8.00 mL) drop-wise, the mixture is stirred at 30° C. for 1 hr, then added compound 7c (3.18 g, 10.6 mmol, 3.35 mL, 0.50 eq) in DCM (8.00 mL) drop-wise, the mixture is stirred at 30° C. for 30 mins, then added compound 7c (3.18 g, 10.6 mmol, 3.35 mL, 0.50 eq) in DCM (8.00 mL) drop-wise, the mixture is stirred at 30° C. for 1.5 hrs. LCMS (EW33072-17-P1C1, Rt=0.921 min) showed the desired MS+1 is detected. LCMS (EW33072-17-P1C2, Rt=0.919 min) showed the desired MS+1 is detected. Two batches are combined for work-up. The mixture is diluted with DCM (1.20 L), washed with saturated NaHCO₃ aqueous solution (1.60 L*2), 3% DMF in H₂O (1.60 L*2), H₂O (1.60 L*3), brine (1.60 L), dried over Na₂SO₄, filtered and concentrated under reduced pressure to give a residue. The residue is purified by column chromatography (SiO₂, DCM:MeOH:TEA=100:3:2) TLC (SiO₂, DCM:MeOH=10:1, R_{f}=0.45), then concentrated under reduced pressure to give a residue. Compound 8C (76.0 g, 34.8 mmol, 82.5% yield, 96.0% purity) is obtained as white solid and confirmed via ¹HNMR: EW33072-19-P1C, 400 MHz, MeOD δ 7.13-7.15 (d, J=8.50 Hz, 2H), 6.95-6.97 (dd, J=8.38, 1.13 Hz, 2H), 5.34 (d, J=2.88 Hz, 3H), 0.09 (dd, J=11.26, 3.38 Hz, 3H), 4.64 (d, J=8.50 Hz, 3H), 3.99-4.20 (m, 12H), 3.88-3.98 (m, 5H), 3.66-3.83 (m, 20H), 3.51-3.65 (m, 17H), 3.33-3.50 (m, 9H), 2.87 (t, J=7.63 Hz, 2H), 2.76 (t, J=5.94 Hz, 2H), 2.42-2.50 (m, 10H), 2.14 (s, 9H), 2.03 (s, 9H), 1.94-1.95 (d, J=6.13 Hz, 18H), 1.24-1.26 (d, J=6.75 Hz, 6H), 1.18-1.20 (d, J=6.75 Hz, 6H)

### Example 20: Modification Motif 1

[0411] An example MST1 siRNA includes a combination of the following modifications:
[0412] Position 9 (from 5′ to 3′) of the sense strand is 2′ F.
[0413] If position 9 is a pyrimidine then all purines in the Sense Strand are 2′OMe, and 1-5 pyrimidines between positions 5 and 11 are 2′ F provided that there are never three 2′F modifications in a row.
[0414] If position 9 is a purine then all pyrimidines in the Sense Strand are 2′OMe, and 1-5 purines between positions 5 and 11 are 2′ F provided that there are never three 2′F modifications in a row.
[0415] Antisense strand odd-numbered positions are 2′OMe and even-numbered positions are a mixture of 2′ F, 2′ OMe and 2′ deoxy.

### Example 21: Modification Motif 2

[0416] An example MST1 siRNA includes a combination of the following modifications:
[0417] Position 9 (from 5′ to 3′) of the sense strand is 2′ deoxy.
[0418] Sense strand positions 5, 7 and 8 are 2′ F.
[0419] All pyrimidines in positions 10-21 are 2′ OMe, and purines are a mixture of 2′ OMe and 2′ F. Alternatively, all purines in positions 10-21 are 2′ OMe and all pyrimidines in positions 10-21 are a mixture of 2′ OMe and 2′ F.
[0420] Antisense strand odd-numbered positions are 2′OMe and even-numbered positions are a mixture of 2′ F, 2′ OMe and 2′ deoxy.

[0421] While preferred embodiments of the present invention have been shown and described herein, it will be obvious to those skilled in the art that such embodiments are provided by way of example only. Numerous variations, changes, and substitutions will now occur to those skilled in the art without departing from the invention. It should be understood that various alternatives to the embodiments of the invention described herein may be employed in practicing the invention. It is intended that the following claims define the scope of the invention and that methods and compositions within the scope of these claims and their equivalents be covered thereby.

### IV. Sequence Information

[0422] Some embodiments include one or more nucleic acid sequences in the following tables:

TABLE 33A
Sequence Information

| SEQ ID NO: | Description |
|---|---|
| 1-3024 | MST1 siRNA sense strand sequences |
| 3025-6048 | MST1 siRNA antisense strand sequences |
| 6049-6086 | Modified MST1 siRNA sense strand sequences |
| 6087-6124 | Modified MST1 siRNA antisense strand sequences |
| 6125-6162 | Alternatively modified MST1 siRNA |
| | sense strand sequences |
| 6163 | Full-length human MST1 mRNA sequence (Ensembl |
| | transcript ID: ENST00000449682.2) (human RNA) |
| 6164-6172 | Modification pattern 1S to 9S |
| 6173-6180 | Modification pattern 1AS to 8AS |
| 6181 | Modification pattern ASO1 |
| 6182-6184 | Examples of RGD peptide sequences |
| 6185 | Full-length human MST1 mRNA sequence (NCBI |
| | Reference Sequence: NM_020998.4) (human RNA) |
| 6186-6244 | Modified MST1 siRNA sense strand sequences |
| 6245-6303 | Modified MST1 siRNA antisense strand sequences |
| 6304-6316 | Placeholders |
| 6317-6318 | ETD01218 sense and antisense strand sequences |
| 6319 | Modification patterns 35S |
| 6320-6344 | Modification patterns 10S-34S |
| 6345-6357 | Modification patterns 9AS-21AS |
| 6358-6387 | Additional MST1 siRNA sense strand sequences |
| 6388-6417 | Additional MST1 siRNA antisense strand sequences |
| 6418-6476 | Example MST1 siRNA sense strand sequences |
| 6477-6535 | Example MST1 siRNA antisense strand sequences |

TABLE 33B
siRNA Sequences

| | SEQ | | SEQ | |
|---|---|---|---|---|
| | ID | sense strand | ID | antisense strand |
| siRNA Name | NO: | sequence (5′-3′) | NO: | sequence (5′-3′) |
| siRNA 1 | 1 | CAGCCUCCGCUAGGGGACC | 3025 | GGUCCCCUAGCGGAGGCUG |
| siRNA 2 | 2 | AGCCUCCGCUAGGGGACCC | 3026 | GGGUCCCCUAGCGGAGGCU |
| siRNA 3 | 3 | GCCUCCGCUAGGGGACCCC | 3027 | GGGGUCCCCUAGCGGAGGC |
| siRNA 4 | 4 | CCUCCGCUAGGGGACCCCC | 3028 | GGGGGUCCCCUAGCGGAGG |
| siRNA 5 | 5 | CUCCGCUAGGGGACCCCCU | 3029 | AGGGGGUCCCCUAGCGGAG |
| siRNA 6 | 6 | UCCGCUAGGGGACCCCCUC | 3030 | GAGGGGGUCCCCUAGCGGA |
| siRNA 7 | 7 | CCGCUAGGGGACCCCCUCC | 3031 | GGAGGGGGUCCCCUAGCGG |
| siRNA 8 | 8 | CGCUAGGGGACCCCCUCCA | 3032 | UGGAGGGGGUCCCCUAGCG |
| siRNA 9 | 9 | GCUAGGGGACCCCCUCCAU | 3033 | AUGGAGGGGGUCCCCUAGC |
| siRNA 10 | 10 | CUAGGGGACCCCCUCCAUG | 3034 | CAUGGAGGGGGUCCCCUAG |
| siRNA 11 | 11 | UAGGGGACCCCCUCCAUGG | 3035 | CCAUGGAGGGGGUCCCCUA |
| siRNA 12 | 12 | AGGGGACCCCCUCCAUGGC | 3036 | GCCAUGGAGGGGGUCCCCU |
| siRNA 13 | 13 | GGGGACCCCCUCCAUGGCU | 3037 | AGCCAUGGAGGGGGUCCCC |
| siRNA 14 | 14 | GGGACCCCCUCCAUGGCUU | 3038 | AAGCCAUGGAGGGGGUCCC |
| siRNA 15 | 15 | GGACCCCCUCCAUGGCUUC | 3039 | GAAGCCAUGGAGGGGGUCC |
| siRNA 16 | 16 | GACCCCCUCCAUGGCUUCC | 3040 | GGAAGCCAUGGAGGGGGUC |
| siRNA 17 | 17 | ACCCCCUCCAUGGCUUCCC | 3041 | GGGAAGCCAUGGAGGGGGU |
| siRNA 18 | 18 | CCCCCUCCAUGGCUUCCCA | 3042 | UGGGAAGCCAUGGAGGGGG |
| siRNA 19 | 19 | CCCCUCCAUGGCUUCCCAC | 3043 | GUGGGAAGCCAUGGAGGGG |
| siRNA 20 | 20 | CCCUCCAUGGCUUCCCACC | 3044 | GGUGGGAAGCCAUGGAGGG |
| siRNA 21 | 21 | CCUCCAUGGCUUCCCACCG | 3045 | CGGUGGGAAGCCAUGGAGG |
| siRNA 22 | 22 | CUCCAUGGCUUCCCACCGG | 3046 | CCGGUGGGAAGCCAUGGAG |
| siRNA 23 | 23 | UCCAUGGCUUCCCACCGGG | 3047 | CCCGGUGGGAAGCCAUGGA |
| siRNA 24 | 24 | CCAUGGCUUCCCACCGGGU | 3048 | ACCCGGUGGGAAGCCAUGG |
| siRNA 25 | 25 | CAUGGCUUCCCACCGGGUU | 3049 | AACCCGGUGGGAAGCCAUG |
| siRNA 26 | 26 | AUGGCUUCCCACCGGGUUG | 3050 | CAACCCGGUGGGAAGCCAU |
| siRNA 27 | 27 | UGGCUUCCCACCGGGUUGU | 3051 | ACAACCCGGUGGGAAGCCA |
| siRNA 28 | 28 | GGCUUCCCACCGGGUUGUU | 3052 | AACAACCCGGUGGGAAGCC |
| siRNA 29 | 29 | GCUUCCCACCGGGUUGUUC | 3053 | GAACAACCCGGUGGGAAGC |
| siRNA 30 | 30 | CUUCCCACCGGGUUGUUCC | 3054 | GGAACAACCCGGUGGGAAG |
| siRNA 31 | 31 | UUCCCACCGGGUUGUUCCA | 3055 | UGGAACAACCCGGUGGGAA |
| siRNA 32 | 32 | UCCCACCGGGUUGUUCCAG | 3056 | CUGGAACAACCCGGUGGGA |
| siRNA 33 | 33 | CCCACCGGGUUGUUCCAGG | 3057 | CCUGGAACAACCCGGUGGG |
| siRNA 34 | 34 | CCACCGGGUUGUUCCAGGC | 3058 | GCCUGGAACAACCCGGUGG |
| siRNA 35 | 35 | CACCGGGUUGUUCCAGGCC | 3059 | GGCCUGGAACAACCCGGUG |
| siRNA 36 | 36 | ACCGGGUUGUUCCAGGCCU | 3060 | AGGCCUGGAACAACCCGGU |
| siRNA 37 | 37 | CCGGGUUGUUCCAGGCCUC | 3061 | GAGGCCUGGAACAACCCGG |
| siRNA 38 | 38 | CGGGUUGUUCCAGGCCUCA | 3062 | UGAGGCCUGGAACAACCCG |
| siRNA 39 | 39 | GGGUUGUUCCAGGCCUCAG | 3063 | CUGAGGCCUGGAACAACCC |
| siRNA 40 | 40 | GGUUGUUCCAGGCCUCAGC | 3064 | GCUGAGGCCUGGAACAACC |
| siRNA 41 | 41 | GUUGUUCCAGGCCUCAGCU | 3065 | AGCUGAGGCCUGGAACAAC |
| siRNA 42 | 42 | UUGUUCCAGGCCUCAGCUU | 3066 | AAGCUGAGGCCUGGAACAA |
| siRNA 43 | 43 | UGUUCCAGGCCUCAGCUUC | 3067 | GAAGCUGAGGCCUGGAACA |
| siRNA 44 | 44 | GUUCCAGGCCUCAGCUUCG | 3068 | CGAAGCUGAGGCCUGGAAC |
| siRNA 45 | 45 | UUCCAGGCCUCAGCUUCGC | 3069 | GCGAAGCUGAGGCCUGGAA |
| siRNA 46 | 46 | UCCAGGCCUCAGCUUCGCC | 3070 | GGCGAAGCUGAGGCCUGGA |
| siRNA 47 | 47 | CCAGGCCUCAGCUUCGCCG | 3071 | CGGCGAAGCUGAGGCCUGG |
| siRNA 48 | 48 | CAGGCCUCAGCUUCGCCGA | 3072 | UCGGCGAAGCUGAGGCCUG |
| siRNA 49 | 49 | AGGCCUCAGCUUCGCCGAA | 3073 | UUCGGCGAAGCUGAGGCCU |
| siRNA 50 | 50 | GGCCUCAGCUUCGCCGAAA | 3074 | UUUCGGCGAAGCUGAGGCC |
| siRNA 51 | 51 | GCCUCAGCUUCGCCGAAAG | 3075 | CUUUCGGCGAAGCUGAGGC |
| siRNA 52 | 52 | CCUCAGCUUCGCCGAAAGG | 3076 | CCUUUCGGCGAAGCUGAGG |
| siRNA 53 | 53 | CUCAGCUUCGCCGAAAGGC | 3077 | GCCUUUCGGCGAAGCUGAG |
| siRNA 54 | 54 | UCAGCUUCGCCGAAAGGCC | 3078 | GGCCUUUCGGCGAAGCUGA |
| siRNA 55 | 55 | CAGCUUCGCCGAAAGGCCU | 3079 | AGGCCUUUCGGCGAAGCUG |
| siRNA 56 | 56 | AGCUUCGCCGAAAGGCCUC | 3080 | GAGGCCUUUCGGCGAAGCU |
| siRNA 57 | 57 | GCUUCGCCGAAAGGCCUCA | 3081 | UGAGGCCUUUCGGCGAAGC |
| siRNA 58 | 58 | CUUCGCCGAAAGGCCUCAC | 3082 | GUGAGGCCUUUCGGCGAAG |
| siRNA 59 | 59 | UUCGCCGAAAGGCCUCACC | 3083 | GGUGAGGCCUUUCGGCGAA |
| siRNA 60 | 60 | UCGCCGAAAGGCCUCACCA | 3084 | UGGUGAGGCCUUUCGGCGA |
| siRNA 61 | 61 | CGCCGAAAGGCCUCACCAC | 3085 | GUGGUGAGGCCUUUCGGCG |
| siRNA 62 | 62 | GCCGAAAGGCCUCACCACC | 3086 | GGUGGUGAGGCCUUUCGGC |
| siRNA 63 | 63 | CCGAAAGGCCUCACCACCU | 3087 | AGGUGGUGAGGCCUUUCGG |
| siRNA 64 | 64 | CGAAAGGCCUCACCACCUC | 3088 | GAGGUGGUGAGGCCUUUCG |
| siRNA 65 | 65 | GAAAGGCCUCACCACCUCC | 3089 | GGAGGUGGUGAGGCCUUUC |
| siRNA 66 | 66 | AAAGGCCUCACCACCUCCG | 3090 | CGGAGGUGGUGAGGCCUUU |
| siRNA 67 | 67 | AAGGCCUCACCACCUCCGA | 3091 | UCGGAGGUGGUGAGGCCUU |
| siRNA 68 | 68 | AGGCCUCACCACCUCCGAC | 3092 | GUCGGAGGUGGUGAGGCCU |
| siRNA 69 | 69 | GGCCUCACCACCUCCGACC | 3093 | GGUCGGAGGUGGUGAGGCC |
| siRNA 70 | 70 | GCCUCACCACCUCCGACCU | 3094 | AGGUCGGAGGUGGUGAGGC |
| siRNA 71 | 71 | CCUCACCACCUCCGACCUC | 3095 | GAGGUCGGAGGUGGUGAGG |
| siRNA 72 | 72 | CUCACCACCUCCGACCUCC | 3096 | GGAGGUCGGAGGUGGUGAG |
| siRNA 73 | 73 | UCACCACCUCCGACCUCCG | 3097 | CGGAGGUCGGAGGUGGUGA |
| siRNA 74 | 74 | CACCACCUCCGACCUCCGC | 3098 | GCGGAGGUCGGAGGUGGUG |
| siRNA 75 | 75 | ACCACCUCCGACCUCCGCC | 3099 | GGCGGAGGUCGGAGGUGGU |
| siRNA 76 | 76 | CCACCUCCGACCUCCGCCU | 3100 | AGGCGGAGGUCGGAGGUGG |
| siRNA 77 | 77 | CACCUCCGACCUCCGCCUG | 3101 | CAGGCGGAGGUCGGAGGUG |
| siRNA 78 | 78 | ACCUCCGACCUCCGCCUGC | 3102 | GCAGGCGGAGGUCGGAGGU |
| siRNA 79 | 79 | CCUCCGACCUCCGCCUGCU | 3103 | AGCAGGCGGAGGUCGGAGG |
| siRNA 80 | 80 | CUCCGACCUCCGCCUGCUC | 3104 | GAGCAGGCGGAGGUCGGAG |
| siRNA 81 | 81 | UCCGACCUCCGCCUGCUCU | 3105 | AGAGCAGGCGGAGGUCGGA |
| siRNA 82 | 82 | CCGACCUCCGCCUGCUCUG | 3106 | CAGAGCAGGCGGAGGUCGG |
| siRNA 83 | 83 | CGACCUCCGCCUGCUCUGG | 3107 | CCAGAGCAGGCGGAGGUCG |
| siRNA 84 | 84 | GACCUCCGCCUGCUCUGGG | 3108 | CCCAGAGCAGGCGGAGGUC |
| siRNA 85 | 85 | ACCUCCGCCUGCUCUGGGG | 3109 | CCCCAGAGCAGGCGGAGGU |
| siRNA 86 | 86 | CCUCCGCCUGCUCUGGGGA | 3110 | UCCCCAGAGCAGGCGGAGG |
| siRNA 87 | 87 | CUCCGCCUGCUCUGGGGAU | 3111 | AUCCCCAGAGCAGGCGGAG |
| siRNA 88 | 88 | UCCGCCUGCUCUGGGGAUG | 3112 | CAUCCCCAGAGCAGGCGGA |
| siRNA 89 | 89 | CCGCCUGCUCUGGGGAUGC | 3113 | GCAUCCCCAGAGCAGGCGG |
| siRNA 90 | 90 | CGCCUGCUCUGGGGAUGCU | 3114 | AGCAUCCCCAGAGCAGGCG |
| siRNA 91 | 91 | GCCUGCUCUGGGGAUGCUC | 3115 | GAGCAUCCCCAGAGCAGGC |
| siRNA 92 | 92 | CCUGCUCUGGGGAUGCUCC | 3116 | GGAGCAUCCCCAGAGCAGG |
| siRNA 93 | 93 | CUGCUCUGGGGAUGCUCCC | 3117 | GGGAGCAUCCCCAGAGCAG |
| siRNA 94 | 94 | UGCUCUGGGGAUGCUCCCA | 3118 | UGGGAGCAUCCCCAGAGCA |
| siRNA 95 | 95 | GCUCUGGGGAUGCUCCCAG | 3119 | CUGGGAGCAUCCCCAGAGC |
| siRNA 96 | 96 | CUCUGGGGAUGCUCCCAGC | 3120 | GCUGGGAGCAUCCCCAGAG |
| siRNA 97 | 97 | UCUGGGGAUGCUCCCAGCC | 3121 | GGCUGGGAGCAUCCCCAGA |
| siRNA 98 | 98 | CUGGGGAUGCUCCCAGCCC | 3122 | GGGCUGGGAGCAUCCCCAG |
| siRNA 99 | 99 | UGGGGAUGCUCCCAGCCCU | 3123 | AGGGCUGGGAGCAUCCCCA |
| siRNA 100 | 100 | GGGGAUGCUCCCAGCCCUG | 3124 | CAGGGCUGGGAGCAUCCCC |
| siRNA 101 | 101 | GGGAUGCUCCCAGCCCUGC | 3125 | GCAGGGCUGGGAGCAUCCC |
| siRNA 102 | 102 | GGAUGCUCCCAGCCCUGCU | 3126 | AGCAGGGCUGGGAGCAUCC |
| siRNA 103 | 103 | GAUGCUCCCAGCCCUGCUG | 3127 | CAGCAGGGCUGGGAGCAUC |
| siRNA 104 | 104 | AUGCUCCCAGCCCUGCUGC | 3128 | GCAGCAGGGCUGGGAGCAU |
| siRNA 105 | 105 | UGCUCCCAGCCCUGCUGCG | 3129 | CGCAGCAGGGCUGGGAGCA |
| siRNA 106 | 106 | GCUCCCAGCCCUGCUGCGG | 3130 | CCGCAGCAGGGCUGGGAGC |
| siRNA 107 | 107 | CUCCCAGCCCUGCUGCGGC | 3131 | GCCGCAGCAGGGCUGGGAG |
| siRNA 108 | 108 | UCCCAGCCCUGCUGCGGCA | 3132 | UGCCGCAGCAGGGCUGGGA |
| siRNA 109 | 109 | CCCAGCCCUGCUGCGGCAG | 3133 | CUGCCGCAGCAGGGCUGGG |
| siRNA 110 | 110 | CCAGCCCUGCUGCGGCAGA | 3134 | UCUGCCGCAGCAGGGCUGG |
| siRNA 111 | 111 | CAGCCCUGCUGCGGCAGAA | 3135 | UUCUGCCGCAGCAGGGCUG |
| siRNA 112 | 112 | AGCCCUGCUGCGGCAGAAC | 3136 | GUUCUGCCGCAGCAGGGCU |
| siRNA 113 | 113 | GCCCUGCUGCGGCAGAACG | 3137 | CGUUCUGCCGCAGCAGGGC |
| siRNA 114 | 114 | CCCUGCUGCGGCAGAACGC | 3138 | GCGUUCUGCCGCAGCAGGG |
| siRNA 115 | 115 | CCUGCUGCGGCAGAACGCG | 3139 | CGCGUUCUGCCGCAGCAGG |
| siRNA 116 | 116 | CUGCUGCGGCAGAACGCGA | 3140 | UCGCGUUCUGCCGCAGCAG |
| siRNA 117 | 117 | UGCUGCGGCAGAACGCGAC | 3141 | GUCGCGUUCUGCCGCAGCA |
| siRNA 118 | 118 | GCUGCGGCAGAACGCGACA | 3142 | UGUCGCGUUCUGCCGCAGC |
| siRNA 119 | 119 | CUGCGGCAGAACGCGACAU | 3143 | AUGUCGCGUUCUGCCGCAG |
| siRNA 120 | 120 | UGCGGCAGAACGCGACAUG | 3144 | CAUGUCGCGUUCUGCCGCA |
| siRNA 121 | 121 | GCGGCAGAACGCGACAUGC | 3145 | GCAUGUCGCGUUCUGCCGC |
| siRNA 122 | 122 | CGGCAGAACGCGACAUGCU | 3146 | AGCAUGUCGCGUUCUGCCG |
| siRNA 123 | 123 | GGCAGAACGCGACAUGCUA | 3147 | UAGCAUGUCGCGUUCUGCC |
| siRNA 124 | 124 | GCAGAACGCGACAUGCUAA | 3148 | UUAGCAUGUCGCGUUCUGC |
| siRNA 125 | 125 | CAGAACGCGACAUGCUAAC | 3149 | GUUAGCAUGUCGCGUUCUG |
| siRNA 126 | 126 | AGAACGCGACAUGCUAACC | 3150 | GGUUAGCAUGUCGCGUUCU |
| siRNA 127 | 127 | GAACGCGACAUGCUAACCG | 3151 | CGGUUAGCAUGUCGCGUUC |
| siRNA 128 | 128 | AACGCGACAUGCUAACCGG | 3152 | CCGGUUAGCAUGUCGCGUU |
| siRNA 129 | 129 | ACGCGACAUGCUAACCGGA | 3153 | UCCGGUUAGCAUGUCGCGU |
| siRNA 130 | 130 | CGCGACAUGCUAACCGGAA | 3154 | UUCCGGUUAGCAUGUCGCG |
| siRNA 131 | 131 | GCGACAUGCUAACCGGAAU | 3155 | AUUCCGGUUAGCAUGUCGC |
| siRNA 132 | 132 | CGACAUGCUAACCGGAAUC | 3156 | GAUUCCGGUUAGCAUGUCG |
| siRNA 133 | 133 | GACAUGCUAACCGGAAUCC | 3157 | GGAUUCCGGUUAGCAUGUC |
| siRNA 134 | 134 | ACAUGCUAACCGGAAUCCC | 3158 | GGGAUUCCGGUUAGCAUGU |
| siRNA 135 | 135 | CAUGCUAACCGGAAUCCCU | 3159 | AGGGAUUCCGGUUAGCAUG |
| siRNA 136 | 136 | AUGCUAACCGGAAUCCCUA | 3160 | UAGGGAUUCCGGUUAGCAU |
| siRNA 137 | 137 | UGCUAACCGGAAUCCCUAG | 3161 | CUAGGGAUUCCGGUUAGCA |
| siRNA 138 | 138 | GCUAACCGGAAUCCCUAGG | 3162 | CCUAGGGAUUCCGGUUAGC |
| siRNA 139 | 139 | CUAACCGGAAUCCCUAGGC | 3163 | GCCUAGGGAUUCCGGUUAG |
| siRNA 140 | 140 | UAACCGGAAUCCCUAGGCC | 3164 | GGCCUAGGGAUUCCGGUUA |
| siRNA 141 | 141 | AACCGGAAUCCCUAGGCCG | 3165 | CGGCCUAGGGAUUCCGGUU |
| siRNA 142 | 142 | ACCGGAAUCCCUAGGCCGC | 3166 | GCGGCCUAGGGAUUCCGGU |
| siRNA 143 | 143 | CCGGAAUCCCUAGGCCGCC | 3167 | GGCGGCCUAGGGAUUCCGG |
| siRNA 144 | 144 | CGGAAUCCCUAGGCCGCCU | 3168 | AGGCGGCCUAGGGAUUCCG |
| siRNA 145 | 145 | GGAAUCCCUAGGCCGCCUG | 3169 | CAGGCGGCCUAGGGAUUCC |
| siRNA 146 | 146 | GAAUCCCUAGGCCGCCUGU | 3170 | ACAGGCGGCCUAGGGAUUC |
| siRNA 147 | 147 | AAUCCCUAGGCCGCCUGUC | 3171 | GACAGGCGGCCUAGGGAUU |
| siRNA 148 | 148 | AUCCCUAGGCCGCCUGUCU | 3172 | AGACAGGCGGCCUAGGGAU |
| siRNA 149 | 149 | UCCCUAGGCCGCCUGUCUC | 3173 | GAGACAGGCGGCCUAGGGA |
| siRNA 150 | 150 | CCCUAGGCCGCCUGUCUCC | 3174 | GGAGACAGGCGGCCUAGGG |
| siRNA 151 | 151 | CCUAGGCCGCCUGUCUCCU | 3175 | AGGAGACAGGCGGCCUAGG |
| siRNA 152 | 152 | CUAGGCCGCCUGUCUCCUA | 3176 | UAGGAGACAGGCGGCCUAG |
| siRNA 153 | 153 | UAGGCCGCCUGUCUCCUAC | 3177 | GUAGGAGACAGGCGGCCUA |
| siRNA 154 | 154 | AGGCCGCCUGUCUCCUACC | 3178 | GGUAGGAGACAGGCGGCCU |
| siRNA 155 | 155 | GGCCGCCUGUCUCCUACCC | 3179 | GGGUAGGAGACAGGCGGCC |
| siRNA 156 | 156 | GCCGCCUGUCUCCUACCCA | 3180 | UGGGUAGGAGACAGGCGGC |
| siRNA 157 | 157 | CCGCCUGUCUCCUACCCAU | 3181 | AUGGGUAGGAGACAGGCGG |
| siRNA 158 | 158 | CGCCUGUCUCCUACCCAUA | 3182 | UAUGGGUAGGAGACAGGCG |
| siRNA 159 | 159 | GCCUGUCUCCUACCCAUAC | 3183 | GUAUGGGUAGGAGACAGGC |
| siRNA 160 | 160 | CCUGUCUCCUACCCAUACU | 3184 | AGUAUGGGUAGGAGACAGG |
| siRNA 161 | 161 | CUGUCUCCUACCCAUACUU | 3185 | AAGUAUGGGUAGGAGACAG |
| siRNA 162 | 162 | UGUCUCCUACCCAUACUUA | 3186 | UAAGUAUGGGUAGGAGACA |
| siRNA 163 | 163 | GUCUCCUACCCAUACUUAG | 3187 | CUAAGUAUGGGUAGGAGAC |
| siRNA 164 | 164 | UCUCCUACCCAUACUUAGA | 3188 | UCUAAGUAUGGGUAGGAGA |
| siRNA 165 | 165 | CUCCUACCCAUACUUAGAG | 3189 | CUCUAAGUAUGGGUAGGAG |
| siRNA 166 | 166 | UCCUACCCAUACUUAGAGG | 3190 | CCUCUAAGUAUGGGUAGGA |
| siRNA 167 | 167 | CCUACCCAUACUUAGAGGC | 3191 | GCCUCUAAGUAUGGGUAGG |
| siRNA 168 | 168 | CUACCCAUACUUAGAGGCC | 3192 | GGCCUCUAAGUAUGGGUAG |
| siRNA 169 | 169 | UACCCAUACUUAGAGGCCC | 3193 | GGGCCUCUAAGUAUGGGUA |
| siRNA 170 | 170 | ACCCAUACUUAGAGGCCCC | 3194 | GGGGCCUCUAAGUAUGGGU |
| siRNA 171 | 171 | CCCAUACUUAGAGGCCCCG | 3195 | CGGGGCCUCUAAGUAUGGG |
| siRNA 172 | 172 | CCAUACUUAGAGGCCCCGC | 3196 | GCGGGGCCUCUAAGUAUGG |
| siRNA 173 | 173 | CAUACUUAGAGGCCCCGCU | 3197 | AGCGGGGCCUCUAAGUAUG |
| siRNA 174 | 174 | AUACUUAGAGGCCCCGCUC | 3198 | GAGCGGGGCCUCUAAGUAU |
| siRNA 175 | 175 | UACUUAGAGGCCCCGCUCA | 3199 | UGAGCGGGGCCUCUAAGUA |
| siRNA 176 | 176 | ACUUAGAGGCCCCGCUCAG | 3200 | CUGAGCGGGGCCUCUAAGU |
| siRNA 177 | 177 | CUUAGAGGCCCCGCUCAGA | 3201 | UCUGAGCGGGGCCUCUAAG |
| siRNA 178 | 178 | UUAGAGGCCCCGCUCAGAC | 3202 | GUCUGAGCGGGGCCUCUAA |
| siRNA 179 | 179 | UAGAGGCCCCGCUCAGACG | 3203 | CGUCUGAGCGGGGCCUCUA |
| siRNA 180 | 180 | AGAGGCCCCGCUCAGACGG | 3204 | CCGUCUGAGCGGGGCCUCU |
| siRNA 181 | 181 | GAGGCCCCGCUCAGACGGU | 3205 | ACCGUCUGAGCGGGGCCUC |
| siRNA 182 | 182 | AGGCCCCGCUCAGACGGUC | 3206 | GACCGUCUGAGCGGGGCCU |
| siRNA 183 | 183 | GGCCCCGCUCAGACGGUCC | 3207 | GGACCGUCUGAGCGGGGCC |
| siRNA 184 | 184 | GCCCCGCUCAGACGGUCCU | 3208 | AGGACCGUCUGAGCGGGGC |
| siRNA 185 | 185 | CCCCGCUCAGACGGUCCUU | 3209 | AAGGACCGUCUGAGCGGGG |
| siRNA 186 | 186 | CCCGCUCAGACGGUCCUUA | 3210 | UAAGGACCGUCUGAGCGGG |
| siRNA 187 | 187 | CCGCUCAGACGGUCCUUAA | 3211 | UUAAGGACCGUCUGAGCGG |
| siRNA 188 | 188 | CGCUCAGACGGUCCUUAAA | 3212 | UUUAAGGACCGUCUGAGCG |
| siRNA 189 | 189 | GCUCAGACGGUCCUUAAAA | 3213 | UUUUAAGGACCGUCUGAGC |
| siRNA 190 | 190 | CUCAGACGGUCCUUAAAAC | 3214 | GUUUUAAGGACCGUCUGAG |
| siRNA 191 | 191 | UCAGACGGUCCUUAAAACG | 3215 | CGUUUUAAGGACCGUCUGA |
| siRNA 192 | 192 | CAGACGGUCCUUAAAACGU | 3216 | ACGUUUUAAGGACCGUCUG |
| siRNA 193 | 193 | AGACGGUCCUUAAAACGUC | 3217 | GACGUUUUAAGGACCGUCU |
| siRNA 194 | 194 | GACGGUCCUUAAAACGUCU | 3218 | AGACGUUUUAAGGACCGUC |
| siRNA 195 | 195 | ACGGUCCUUAAAACGUCUG | 3219 | CAGACGUUUUAAGGACCGU |
| siRNA 196 | 196 | CGGUCCUUAAAACGUCUGA | 3220 | UCAGACGUUUUAAGGACCG |
| siRNA 197 | 197 | GGUCCUUAAAACGUCUGAA | 3221 | UUCAGACGUUUUAAGGACC |
| siRNA 198 | 198 | GUCCUUAAAACGUCUGAAA | 3222 | UUUCAGACGUUUUAAGGAC |
| siRNA 199 | 199 | UCCUUAAAACGUCUGAAAG | 3223 | CUUUCAGACGUUUUAAGGA |
| siRNA 200 | 200 | CCUUAAAACGUCUGAAAGG | 3224 | CCUUUCAGACGUUUUAAGG |
| siRNA 201 | 201 | CUUAAAACGUCUGAAAGGC | 3225 | GCCUUUCAGACGUUUUAAG |
| siRNA 202 | 202 | UUAAAACGUCUGAAAGGCC | 3226 | GGCCUUUCAGACGUUUUAA |
| siRNA 203 | 203 | UAAAACGUCUGAAAGGCCG | 3227 | CGGCCUUUCAGACGUUUUA |
| siRNA 204 | 204 | AAAACGUCUGAAAGGCCGU | 3228 | ACGGCCUUUCAGACGUUUU |
| siRNA 205 | 205 | AAACGUCUGAAAGGCCGUU | 3229 | AACGGCCUUUCAGACGUUU |
| siRNA 206 | 206 | AACGUCUGAAAGGCCGUUC | 3230 | GAACGGCCUUUCAGACGUU |
| siRNA 207 | 207 | ACGUCUGAAAGGCCGUUCC | 3231 | GGAACGGCCUUUCAGACGU |
| siRNA 208 | 208 | CGUCUGAAAGGCCGUUCCU | 3232 | AGGAACGGCCUUUCAGACG |
| siRNA 209 | 209 | GUCUGAAAGGCCGUUCCUG | 3233 | CAGGAACGGCCUUUCAGAC |
| siRNA 210 | 210 | UCUGAAAGGCCGUUCCUGC | 3234 | GCAGGAACGGCCUUUCAGA |
| siRNA 211 | 211 | CUGAAAGGCCGUUCCUGCC | 3235 | GGCAGGAACGGCCUUUCAG |
| siRNA 212 | 212 | UGAAAGGCCGUUCCUGCCA | 3236 | UGGCAGGAACGGCCUUUCA |
| siRNA 213 | 213 | GAAAGGCCGUUCCUGCCAG | 3237 | CUGGCAGGAACGGCCUUUC |
| siRNA 214 | 214 | AAAGGCCGUUCCUGCCAGA | 3238 | UCUGGCAGGAACGGCCUUU |
| siRNA 215 | 215 | AAGGCCGUUCCUGCCAGAG | 3239 | CUCUGGCAGGAACGGCCUU |
| siRNA 216 | 216 | AGGCCGUUCCUGCCAGAGU | 3240 | ACUCUGGCAGGAACGGCCU |
| siRNA 217 | 217 | GGCCGUUCCUGCCAGAGUC | 3241 | GACUCUGGCAGGAACGGCC |
| siRNA 218 | 218 | GCCGUUCCUGCCAGAGUCC | 3242 | GGACUCUGGCAGGAACGGC |
| siRNA 219 | 219 | CCGUUCCUGCCAGAGUCCC | 3243 | GGGACUCUGGCAGGAACGG |
| siRNA 220 | 220 | CGUUCCUGCCAGAGUCCCU | 3244 | AGGGACUCUGGCAGGAACG |
| siRNA 221 | 221 | GUUCCUGCCAGAGUCCCUG | 3245 | CAGGGACUCUGGCAGGAAC |
| siRNA 222 | 222 | UUCCUGCCAGAGUCCCUGC | 3246 | GCAGGGACUCUGGCAGGAA |
| siRNA 223 | 223 | UCCUGCCAGAGUCCCUGCU | 3247 | AGCAGGGACUCUGGCAGGA |
| siRNA 224 | 224 | CCUGCCAGAGUCCCUGCUA | 3248 | UAGCAGGGACUCUGGCAGG |
| siRNA 225 | 225 | CUGCCAGAGUCCCUGCUAC | 3249 | GUAGCAGGGACUCUGGCAG |
| siRNA 226 | 226 | UGCCAGAGUCCCUGCUACC | 3250 | GGUAGCAGGGACUCUGGCA |
| siRNA 227 | 227 | GCCAGAGUCCCUGCUACCU | 3251 | AGGUAGCAGGGACUCUGGC |
| siRNA 228 | 228 | CCAGAGUCCCUGCUACCUG | 3252 | CAGGUAGCAGGGACUCUGG |
| siRNA 229 | 229 | CAGAGUCCCUGCUACCUGU | 3253 | ACAGGUAGCAGGGACUCUG |
| siRNA 230 | 230 | AGAGUCCCUGCUACCUGUU | 3254 | AACAGGUAGCAGGGACUCU |
| siRNA 231 | 231 | GAGUCCCUGCUACCUGUUA | 3255 | UAACAGGUAGCAGGGACUC |
| siRNA 232 | 232 | AGUCCCUGCUACCUGUUAC | 3256 | GUAACAGGUAGCAGGGACU |
| siRNA 233 | 233 | GUCCCUGCUACCUGUUACC | 3257 | GGUAACAGGUAGCAGGGAC |
| siRNA 234 | 234 | UCCCUGCUACCUGUUACCU | 3258 | AGGUAACAGGUAGCAGGGA |
| siRNA 235 | 235 | CCCUGCUACCUGUUACCUC | 3259 | GAGGUAACAGGUAGCAGGG |
| siRNA 236 | 236 | CCUGCUACCUGUUACCUCC | 3260 | GGAGGUAACAGGUAGCAGG |
| siRNA 237 | 237 | CUGCUACCUGUUACCUCCA | 3261 | UGGAGGUAACAGGUAGCAG |
| siRNA 238 | 238 | UGCUACCUGUUACCUCCAC | 3262 | GUGGAGGUAACAGGUAGCA |
| siRNA 239 | 239 | GCUACCUGUUACCUCCACC | 3263 | GGUGGAGGUAACAGGUAGC |
| siRNA 240 | 240 | CUACCUGUUACCUCCACCC | 3264 | GGGUGGAGGUAACAGGUAG |
| siRNA 241 | 241 | UACCUGUUACCUCCACCCC | 3265 | GGGGUGGAGGUAACAGGUA |
| siRNA 242 | 242 | ACCUGUUACCUCCACCCCU | 3266 | AGGGGUGGAGGUAACAGGU |
| siRNA 243 | 243 | CCUGUUACCUCCACCCCUA | 3267 | UAGGGGUGGAGGUAACAGG |
| siRNA 244 | 244 | CUGUUACCUCCACCCCUAU | 3268 | AUAGGGGUGGAGGUAACAG |
| siRNA 245 | 245 | UGUUACCUCCACCCCUAUU | 3269 | AAUAGGGGUGGAGGUAACA |
| siRNA 246 | 246 | GUUACCUCCACCCCUAUUU | 3270 | AAAUAGGGGUGGAGGUAAC |
| siRNA 247 | 247 | UUACCUCCACCCCUAUUUA | 3271 | UAAAUAGGGGUGGAGGUAA |
| siRNA 248 | 248 | UACCUCCACCCCUAUUUAG | 3272 | CUAAAUAGGGGUGGAGGUA |
| siRNA 249 | 249 | ACCUCCACCCCUAUUUAGU | 3273 | ACUAAAUAGGGGUGGAGGU |
| siRNA 250 | 250 | CCUCCACCCCUAUUUAGUC | 3274 | GACUAAAUAGGGGUGGAGG |
| siRNA 251 | 251 | CUCCACCCCUAUUUAGUCC | 3275 | GGACUAAAUAGGGGUGGAG |
| siRNA 252 | 252 | UCCACCCCUAUUUAGUCCU | 3276 | AGGACUAAAUAGGGGUGGA |
| siRNA 253 | 253 | CCACCCCUAUUUAGUCCUA | 3277 | UAGGACUAAAUAGGGGUGG |
| siRNA 254 | 254 | CACCCCUAUUUAGUCCUAG | 3278 | CUAGGACUAAAUAGGGGUG |
| siRNA 255 | 255 | ACCCCUAUUUAGUCCUAGU | 3279 | ACUAGGACUAAAUAGGGGU |
| siRNA 256 | 256 | CCCCUAUUUAGUCCUAGUG | 3280 | CACUAGGACUAAAUAGGGG |
| siRNA 257 | 257 | CCCUAUUUAGUCCUAGUGG | 3281 | CCACUAGGACUAAAUAGGG |
| siRNA 258 | 258 | CCUAUUUAGUCCUAGUGGA | 3282 | UCCACUAGGACUAAAUAGG |
| siRNA 259 | 259 | CUAUUUAGUCCUAGUGGAC | 3283 | GUCCACUAGGACUAAAUAG |
| siRNA 260 | 260 | UAUUUAGUCCUAGUGGACA | 3284 | UGUCCACUAGGACUAAAUA |
| siRNA 261 | 261 | AUUUAGUCCUAGUGGACAG | 3285 | CUGUCCACUAGGACUAAAU |
| siRNA 262 | 262 | UUUAGUCCUAGUGGACAGC | 3286 | GCUGUCCACUAGGACUAAA |
| siRNA 263 | 263 | UUAGUCCUAGUGGACAGCC | 3287 | GGCUGUCCACUAGGACUAA |
| siRNA 264 | 264 | UAGUCCUAGUGGACAGCCU | 3288 | AGGCUGUCCACUAGGACUA |
| siRNA 265 | 265 | AGUCCUAGUGGACAGCCUC | 3289 | GAGGCUGUCCACUAGGACU |
| siRNA 266 | 266 | GUCCUAGUGGACAGCCUCG | 3290 | CGAGGCUGUCCACUAGGAC |
| siRNA 267 | 267 | UCCUAGUGGACAGCCUCGC | 3291 | GCGAGGCUGUCCACUAGGA |
| siRNA 268 | 268 | CCUAGUGGACAGCCUCGCU | 3292 | AGCGAGGCUGUCCACUAGG |
| siRNA 269 | 269 | CUAGUGGACAGCCUCGCUC | 3293 | GAGCGAGGCUGUCCACUAG |
| SiRNA 270 | 270 | UAGUGGACAGCCUCGCUCA | 3294 | UGAGCGAGGCUGUCCACUA |
| siRNA 271 | 271 | AGUGGACAGCCUCGCUCAC | 3295 | GUGAGCGAGGCUGUCCACU |
| siRNA 272 | 272 | GUGGACAGCCUCGCUCACC | 3296 | GGUGAGCGAGGCUGUCCAC |
| siRNA 273 | 273 | UGGACAGCCUCGCUCACCU | 3297 | AGGUGAGCGAGGCUGUCCA |
| siRNA 274 | 274 | GGACAGCCUCGCUCACCUU | 3298 | AAGGUGAGCGAGGCUGUCC |
| siRNA 275 | 275 | GACAGCCUCGCUCACCUUC | 3299 | GAAGGUGAGCGAGGCUGUC |
| siRNA 276 | 276 | ACAGCCUCGCUCACCUUCC | 3300 | GGAAGGUGAGCGAGGCUGU |
| siRNA 277 | 277 | CAGCCUCGCUCACCUUCCC | 3301 | GGGAAGGUGAGCGAGGCUG |
| siRNA 278 | 278 | AGCCUCGCUCACCUUCCCU | 3302 | AGGGAAGGUGAGCGAGGCU |
| siRNA 279 | 279 | GCCUCGCUCACCUUCCCUG | 3303 | CAGGGAAGGUGAGCGAGGC |
| siRNA 280 | 280 | CCUCGCUCACCUUCCCUGG | 3304 | CCAGGGAAGGUGAGCGAGG |
| siRNA 281 | 281 | CUCGCUCACCUUCCCUGGG | 3305 | CCCAGGGAAGGUGAGCGAG |
| siRNA 282 | 282 | UCGCUCACCUUCCCUGGGA | 3306 | UCCCAGGGAAGGUGAGCGA |
| siRNA 283 | 283 | CGCUCACCUUCCCUGGGAU | 3307 | AUCCCAGGGAAGGUGAGCG |
| siRNA 284 | 284 | GCUCACCUUCCCUGGGAUG | 3308 | CAUCCCAGGGAAGGUGAGC |
| siRNA 285 | 285 | CUCACCUUCCCUGGGAUGA | 3309 | UCAUCCCAGGGAAGGUGAG |
| siRNA 286 | 286 | UCACCUUCCCUGGGAUGAC | 3310 | GUCAUCCCAGGGAAGGUGA |
| siRNA 287 | 287 | CACCUUCCCUGGGAUGACA | 3311 | UGUCAUCCCAGGGAAGGUG |
| siRNA 288 | 288 | ACCUUCCCUGGGAUGACAC | 3312 | GUGUCAUCCCAGGGAAGGU |
| siRNA 289 | 289 | CCUUCCCUGGGAUGACACU | 3313 | AGUGUCAUCCCAGGGAAGG |
| siRNA 290 | 290 | CUUCCCUGGGAUGACACUU | 3314 | AAGUGUCAUCCCAGGGAAG |
| siRNA 291 | 291 | UUCCCUGGGAUGACACUUC | 3315 | GAAGUGUCAUCCCAGGGAA |
| siRNA 292 | 292 | UCCCUGGGAUGACACUUCU | 3316 | AGAAGUGUCAUCCCAGGGA |
| siRNA 293 | 293 | CCCUGGGAUGACACUUCUG | 3317 | CAGAAGUGUCAUCCCAGGG |
| siRNA 294 | 294 | CCUGGGAUGACACUUCUGG | 3318 | CCAGAAGUGUCAUCCCAGG |
| siRNA 295 | 295 | CUGGGAUGACACUUCUGGC | 3319 | GCCAGAAGUGUCAUCCCAG |
| siRNA 296 | 296 | UGGGAUGACACUUCUGGCG | 3320 | CGCCAGAAGUGUCAUCCCA |
| siRNA 297 | 297 | GGGAUGACACUUCUGGCGG | 3321 | CCGCCAGAAGUGUCAUCCC |
| siRNA 298 | 298 | GGAUGACACUUCUGGCGGC | 3322 | GCCGCCAGAAGUGUCAUCC |
| siRNA 299 | 299 | GAUGACACUUCUGGCGGCU | 3323 | AGCCGCCAGAAGUGUCAUC |
| siRNA 300 | 300 | AUGACACUUCUGGCGGCUG | 3324 | CAGCCGCCAGAAGUGUCAU |
| siRNA 301 | 301 | UGACACUUCUGGCGGCUGA | 3325 | UCAGCCGCCAGAAGUGUCA |
| siRNA 302 | 302 | GACACUUCUGGCGGCUGAG | 3326 | CUCAGCCGCCAGAAGUGUC |
| siRNA 303 | 303 | ACACUUCUGGCGGCUGAGA | 3327 | UCUCAGCCGCCAGAAGUGU |
| siRNA 304 | 304 | CACUUCUGGCGGCUGAGAU | 3328 | AUCUCAGCCGCCAGAAGUG |
| siRNA 305 | 305 | ACUUCUGGCGGCUGAGAUG | 3329 | CAUCUCAGCCGCCAGAAGU |
| siRNA 306 | 306 | CUUCUGGCGGCUGAGAUGA | 3330 | UCAUCUCAGCCGCCAGAAG |
| siRNA 307 | 307 | UUCUGGCGGCUGAGAUGAG | 3331 | CUCAUCUCAGCCGCCAGAA |
| siRNA 308 | 308 | UCUGGCGGCUGAGAUGAGC | 3332 | GCUCAUCUCAGCCGCCAGA |
| siRNA 309 | 309 | CUGGCGGCUGAGAUGAGCG | 3333 | CGCUCAUCUCAGCCGCCAG |
| siRNA 310 | 310 | UGGCGGCUGAGAUGAGCGA | 3334 | UCGCUCAUCUCAGCCGCCA |
| siRNA 311 | 311 | GGCGGCUGAGAUGAGCGAG | 3335 | CUCGCUCAUCUCAGCCGCC |
| siRNA 312 | 312 | GCGGCUGAGAUGAGCGAGC | 3336 | GCUCGCUCAUCUCAGCCGC |
| siRNA 313 | 313 | CGGCUGAGAUGAGCGAGCC | 3337 | GGCUCGCUCAUCUCAGCCG |
| siRNA 314 | 314 | GGCUGAGAUGAGCGAGCCU | 3338 | AGGCUCGCUCAUCUCAGCC |
| siRNA 315 | 315 | GCUGAGAUGAGCGAGCCUC | 3339 | GAGGCUCGCUCAUCUCAGC |
| siRNA 316 | 316 | CUGAGAUGAGCGAGCCUCU | 3340 | AGAGGCUCGCUCAUCUCAG |
| siRNA 317 | 317 | UGAGAUGAGCGAGCCUCUC | 3341 | GAGAGGCUCGCUCAUCUCA |
| siRNA 318 | 318 | GAGAUGAGCGAGCCUCUCU | 3342 | AGAGAGGCUCGCUCAUCUC |
| siRNA 319 | 319 | AGAUGAGCGAGCCUCUCUG | 3343 | CAGAGAGGCUCGCUCAUCU |
| siRNA 320 | 320 | GAUGAGCGAGCCUCUCUGG | 3344 | CCAGAGAGGCUCGCUCAUC |
| siRNA 321 | 321 | AUGAGCGAGCCUCUCUGGG | 3345 | CCCAGAGAGGCUCGCUCAU |
| siRNA 322 | 322 | UGAGCGAGCCUCUCUGGGC | 3346 | GCCCAGAGAGGCUCGCUCA |
| siRNA 323 | 323 | GAGCGAGCCUCUCUGGGCU | 3347 | AGCCCAGAGAGGCUCGCUC |
| siRNA 324 | 324 | AGCGAGCCUCUCUGGGCUC | 3348 | GAGCCCAGAGAGGCUCGCU |
| siRNA 325 | 325 | GCGAGCCUCUCUGGGCUCU | 3349 | AGAGCCCAGAGAGGCUCGC |
| siRNA 326 | 326 | CGAGCCUCUCUGGGCUCUG | 3350 | CAGAGCCCAGAGAGGCUCG |
| siRNA 327 | 327 | GAGCCUCUCUGGGCUCUGC | 3351 | GCAGAGCCCAGAGAGGCUC |
| siRNA 328 | 328 | AGCCUCUCUGGGCUCUGCC | 3352 | GGCAGAGCCCAGAGAGGCU |
| siRNA 329 | 329 | GCCUCUCUGGGCUCUGCCG | 3353 | CGGCAGAGCCCAGAGAGGC |
| siRNA 330 | 330 | CCUCUCUGGGCUCUGCCGC | 3354 | GCGGCAGAGCCCAGAGAGG |
| siRNA 331 | 331 | CUCUCUGGGCUCUGCCGCC | 3355 | GGCGGCAGAGCCCAGAGAG |
| siRNA 332 | 332 | UCUCUGGGCUCUGCCGCCG | 3356 | CGGCGGCAGAGCCCAGAGA |
| siRNA 333 | 333 | CUCUGGGCUCUGCCGCCGG | 3357 | CCGGCGGCAGAGCCCAGAG |
| siRNA 334 | 334 | UCUGGGCUCUGCCGCCGGG | 3358 | CCCGGCGGCAGAGCCCAGA |
| siRNA 335 | 335 | CUGGGCUCUGCCGCCGGGU | 3359 | ACCCGGCGGCAGAGCCCAG |
| siRNA 336 | 336 | UGGGCUCUGCCGCCGGGUG | 3360 | CACCCGGCGGCAGAGCCCA |
| siRNA 337 | 337 | GGGCUCUGCCGCCGGGUGU | 3361 | ACACCCGGCGGCAGAGCCC |
| siRNA 338 | 338 | GGCUCUGCCGCCGGGUGUG | 3362 | CACACCCGGCGGCAGAGCC |
| siRNA 339 | 339 | GCUCUGCCGCCGGGUGUGG | 3363 | CCACACCCGGCGGCAGAGC |
| siRNA 340 | 340 | CUCUGCCGCCGGGUGUGGG | 3364 | CCCACACCCGGCGGCAGAG |
| siRNA 341 | 341 | UCUGCCGCCGGGUGUGGGC | 3365 | GCCCACACCCGGCGGCAGA |
| siRNA 342 | 342 | CUGCCGCCGGGUGUGGGCU | 3366 | AGCCCACACCCGGCGGCAG |
| siRNA 343 | 343 | UGCCGCCGGGUGUGGGCUG | 3367 | CAGCCCACACCCGGCGGCA |
| siRNA 344 | 344 | GCCGCCGGGUGUGGGCUGA | 3368 | UCAGCCCACACCCGGCGGC |
| siRNA 345 | 345 | CCGCCGGGUGUGGGCUGAC | 3369 | GUCAGCCCACACCCGGCGG |
| siRNA 346 | 346 | CGCCGGGUGUGGGCUGACC | 3370 | GGUCAGCCCACACCCGGCG |
| siRNA 347 | 347 | GCCGGGUGUGGGCUGACCU | 3371 | AGGUCAGCCCACACCCGGC |
| siRNA 348 | 348 | CCGGGUGUGGGCUGACCUG | 3372 | CAGGUCAGCCCACACCCGG |
| siRNA 349 | 349 | CGGGUGUGGGCUGACCUGC | 3373 | GCAGGUCAGCCCACACCCG |
| siRNA 350 | 350 | GGGUGUGGGCUGACCUGCC | 3374 | GGCAGGUCAGCCCACACCC |
| siRNA 351 | 351 | GGUGUGGGCUGACCUGCCU | 3375 | AGGCAGGUCAGCCCACACC |
| siRNA 352 | 352 | GUGUGGGCUGACCUGCCUA | 3376 | UAGGCAGGUCAGCCCACAC |
| siRNA 353 | 353 | UGUGGGCUGACCUGCCUAC | 3377 | GUAGGCAGGUCAGCCCACA |
| siRNA 354 | 354 | GUGGGCUGACCUGCCUACA | 3378 | UGUAGGCAGGUCAGCCCAC |
| siRNA 355 | 355 | UGGGCUGACCUGCCUACAG | 3379 | CUGUAGGCAGGUCAGCCCA |
| siRNA 356 | 356 | GGGCUGACCUGCCUACAGC | 3380 | GCUGUAGGCAGGUCAGCCC |
| siRNA 357 | 357 | GGCUGACCUGCCUACAGCU | 3381 | AGCUGUAGGCAGGUCAGCC |
| siRNA 358 | 358 | GCUGACCUGCCUACAGCUG | 3382 | CAGCUGUAGGCAGGUCAGC |
| siRNA 359 | 359 | CUGACCUGCCUACAGCUGG | 3383 | CCAGCUGUAGGCAGGUCAG |
| siRNA 360 | 360 | UGACCUGCCUACAGCUGGG | 3384 | CCCAGCUGUAGGCAGGUCA |
| siRNA 361 | 361 | GACCUGCCUACAGCUGGGG | 3385 | CCCCAGCUGUAGGCAGGUC |
| siRNA 362 | 362 | ACCUGCCUACAGCUGGGGC | 3386 | GCCCCAGCUGUAGGCAGGU |
| siRNA 363 | 363 | CCUGCCUACAGCUGGGGCC | 3387 | GGCCCCAGCUGUAGGCAGG |
| siRNA 364 | 364 | CUGCCUACAGCUGGGGCCU | 3388 | AGGCCCCAGCUGUAGGCAG |
| siRNA 365 | 365 | UGCCUACAGCUGGGGCCUG | 3389 | CAGGCCCCAGCUGUAGGCA |
| siRNA 366 | 366 | GCCUACAGCUGGGGCCUGA | 3390 | UCAGGCCCCAGCUGUAGGC |
| siRNA 367 | 367 | CCUACAGCUGGGGCCUGAU | 3391 | AUCAGGCCCCAGCUGUAGG |
| siRNA 368 | 368 | CUACAGCUGGGGCCUGAUA | 3392 | UAUCAGGCCCCAGCUGUAG |
| siRNA 369 | 369 | UACAGCUGGGGCCUGAUAA | 3393 | UUAUCAGGCCCCAGCUGUA |
| siRNA 370 | 370 | ACAGCUGGGGCCUGAUAAG | 3394 | CUUAUCAGGCCCCAGCUGU |
| siRNA 371 | 371 | CAGCUGGGGCCUGAUAAGG | 3395 | CCUUAUCAGGCCCCAGCUG |
| siRNA 372 | 372 | AGCUGGGGCCUGAUAAGGC | 3396 | GCCUUAUCAGGCCCCAGCU |
| siRNA 373 | 373 | GCUGGGGCCUGAUAAGGCA | 3397 | UGCCUUAUCAGGCCCCAGC |
| siRNA 374 | 374 | CUGGGGCCUGAUAAGGCAG | 3398 | CUGCCUUAUCAGGCCCCAG |
| siRNA 375 | 375 | UGGGGCCUGAUAAGGCAGC | 3399 | GCUGCCUUAUCAGGCCCCA |
| siRNA 376 | 376 | GGGGCCUGAUAAGGCAGCA | 3400 | UGCUGCCUUAUCAGGCCCC |
| siRNA 377 | 377 | GGGCCUGAUAAGGCAGCAG | 3401 | CUGCUGCCUUAUCAGGCCC |
| siRNA 378 | 378 | GGCCUGAUAAGGCAGCAGC | 3402 | GCUGCUGCCUUAUCAGGCC |
| siRNA 379 | 379 | GCCUGAUAAGGCAGCAGCA | 3403 | UGCUGCUGCCUUAUCAGGC |
| siRNA 380 | 380 | CCUGAUAAGGCAGCAGCAA | 3404 | UUGCUGCUGCCUUAUCAGG |
| siRNA 381 | 381 | CUGAUAAGGCAGCAGCAAA | 3405 | UUUGCUGCUGCCUUAUCAG |
| siRNA 382 | 382 | UGAUAAGGCAGCAGCAAAA | 3406 | UUUUGCUGCUGCCUUAUCA |
| siRNA 383 | 383 | GAUAAGGCAGCAGCAAAAG | 3407 | CUUUUGCUGCUGCCUUAUC |
| siRNA 384 | 384 | AUAAGGCAGCAGCAAAAGG | 3408 | CCUUUUGCUGCUGCCUUAU |
| siRNA 385 | 385 | UAAGGCAGCAGCAAAAGGG | 3409 | CCCUUUUGCUGCUGCCUUA |
| siRNA 386 | 386 | AAGGCAGCAGCAAAAGGGU | 3410 | ACCCUUUUGCUGCUGCCUU |
| siRNA 387 | 387 | AGGCAGCAGCAAAAGGGUG | 3411 | CACCCUUUUGCUGCUGCCU |
| siRNA 388 | 388 | GGCAGCAGCAAAAGGGUGG | 3412 | CCACCCUUUUGCUGCUGCC |
| siRNA 389 | 389 | GCAGCAGCAAAAGGGUGGA | 3413 | UCCACCCUUUUGCUGCUGC |
| siRNA 390 | 390 | CAGCAGCAAAAGGGUGGAG | 3414 | CUCCACCCUUUUGCUGCUG |
| siRNA 391 | 391 | AGCAGCAAAAGGGUGGAGG | 3415 | CCUCCACCCUUUUGCUGCU |
| siRNA 392 | 392 | GCAGCAAAAGGGUGGAGGG | 3416 | CCCUCCACCCUUUUGCUGC |
| siRNA 393 | 393 | CAGCAAAAGGGUGGAGGGG | 3417 | CCCCUCCACCCUUUUGCUG |
| siRNA 394 | 394 | AGCAAAAGGGUGGAGGGGA | 3418 | UCCCCUCCACCCUUUUGCU |
| siRNA 395 | 395 | GCAAAAGGGUGGAGGGGAG | 3419 | CUCCCCUCCACCCUUUUGC |
| siRNA 396 | 396 | CAAAAGGGUGGAGGGGAGG | 3420 | CCUCCCCUCCACCCUUUUG |
| siRNA 397 | 397 | AAAAGGGUGGAGGGGAGGC | 3421 | GCCUCCCCUCCACCCUUUU |
| siRNA 398 | 398 | AAAGGGUGGAGGGGAGGCA | 3422 | UGCCUCCCCUCCACCCUUU |
| siRNA 399 | 399 | AAGGGUGGAGGGGAGGCAG | 3423 | CUGCCUCCCCUCCACCCUU |
| siRNA 400 | 400 | AGGGUGGAGGGGAGGCAGU | 3424 | ACUGCCUCCCCUCCACCCU |
| siRNA 401 | 401 | GGGUGGAGGGGAGGCAGUG | 3425 | CACUGCCUCCCCUCCACCC |
| siRNA 402 | 402 | GGUGGAGGGGAGGCAGUGU | 3426 | ACACUGCCUCCCCUCCACC |
| siRNA 403 | 403 | GUGGAGGGGAGGCAGUGUU | 3427 | AACACUGCCUCCCCUCCAC |
| siRNA 404 | 404 | UGGAGGGGAGGCAGUGUUG | 3428 | CAACACUGCCUCCCCUCCA |
| siRNA 405 | 405 | GGAGGGGAGGCAGUGUUGA | 3429 | UCAACACUGCCUCCCCUCC |
| siRNA 406 | 406 | GAGGGGAGGCAGUGUUGAA | 3430 | UUCAACACUGCCUCCCCUC |
| siRNA 407 | 407 | AGGGGAGGCAGUGUUGAAG | 3431 | CUUCAACACUGCCUCCCCU |
| siRNA 408 | 408 | GGGGAGGCAGUGUUGAAGC | 3432 | GCUUCAACACUGCCUCCCC |
| siRNA 409 | 409 | GGGAGGCAGUGUUGAAGCU | 3433 | AGCUUCAACACUGCCUCCC |
| siRNA 410 | 410 | GGAGGCAGUGUUGAAGCUG | 3434 | CAGCUUCAACACUGCCUCC |
| siRNA 411 | 411 | GAGGCAGUGUUGAAGCUGG | 3435 | CCAGCUUCAACACUGCCUC |
| siRNA 412 | 412 | AGGCAGUGUUGAAGCUGGG | 3436 | CCCAGCUUCAACACUGCCU |
| siRNA 413 | 413 | GGCAGUGUUGAAGCUGGGG | 3437 | CCCCAGCUUCAACACUGCC |
| siRNA 414 | 414 | GCAGUGUUGAAGCUGGGGC | 3438 | GCCCCAGCUUCAACACUGC |
| siRNA 415 | 415 | CAGUGUUGAAGCUGGGGCA | 3439 | UGCCCCAGCUUCAACACUG |
| siRNA 416 | 416 | AGUGUUGAAGCUGGGGCAA | 3440 | UUGCCCCAGCUUCAACACU |
| siRNA 417 | 417 | GUGUUGAAGCUGGGGCAAG | 3441 | CUUGCCCCAGCUUCAACAC |
| siRNA 418 | 418 | UGUUGAAGCUGGGGCAAGU | 3442 | ACUUGCCCCAGCUUCAACA |
| siRNA 419 | 419 | GUUGAAGCUGGGGCAAGUA | 3443 | UACUUGCCCCAGCUUCAAC |
| siRNA 420 | 420 | UUGAAGCUGGGGCAAGUAA | 3444 | UUACUUGCCCCAGCUUCAA |
| siRNA 421 | 421 | UGAAGCUGGGGCAAGUAAU | 3445 | AUUACUUGCCCCAGCUUCA |
| siRNA 422 | 422 | GAAGCUGGGGCAAGUAAUU | 3446 | AAUUACUUGCCCCAGCUUC |
| siRNA 423 | 423 | AAGCUGGGGCAAGUAAUUU | 3447 | AAAUUACUUGCCCCAGCUU |
| siRNA 424 | 424 | AGCUGGGGCAAGUAAUUUU | 3448 | AAAAUUACUUGCCCCAGCU |
| siRNA 425 | 425 | GCUGGGGCAAGUAAUUUUC | 3449 | GAAAAUUACUUGCCCCAGC |
| siRNA 426 | 426 | CUGGGGCAAGUAAUUUUCC | 3450 | GGAAAAUUACUUGCCCCAG |
| siRNA 427 | 427 | UGGGGCAAGUAAUUUUCCC | 3451 | GGGAAAAUUACUUGCCCCA |
| siRNA 428 | 428 | GGGGCAAGUAAUUUUCCCC | 3452 | GGGGAAAAUUACUUGCCCC |
| siRNA 429 | 429 | GGGCAAGUAAUUUUCCCCA | 3453 | UGGGGAAAAUUACUUGCCC |
| siRNA 430 | 430 | GGCAAGUAAUUUUCCCCAA | 3454 | UUGGGGAAAAUUACUUGCC |
| siRNA 431 | 431 | GCAAGUAAUUUUCCCCAAU | 3455 | AUUGGGGAAAAUUACUUGC |
| siRNA 432 | 432 | CAAGUAAUUUUCCCCAAUU | 3456 | AAUUGGGGAAAAUUACUUG |
| siRNA 433 | 433 | AAGUAAUUUUCCCCAAUUU | 3457 | AAAUUGGGGAAAAUUACUU |
| siRNA 434 | 434 | AGUAAUUUUCCCCAAUUUA | 3458 | UAAAUUGGGGAAAAUUACU |
| siRNA 435 | 435 | GUAAUUUUCCCCAAUUUAC | 3459 | GUAAAUUGGGGAAAAUUAC |
| siRNA 436 | 436 | UAAUUUUCCCCAAUUUACA | 3460 | UGUAAAUUGGGGAAAAUUA |
| siRNA 437 | 437 | AAUUUUCCCCAAUUUACAG | 3461 | CUGUAAAUUGGGGAAAAUU |
| siRNA 438 | 438 | AUUUUCCCCAAUUUACAGG | 3462 | CCUGUAAAUUGGGGAAAAU |
| siRNA 439 | 439 | UUUUCCCCAAUUUACAGGG | 3463 | CCCUGUAAAUUGGGGAAAA |
| siRNA 440 | 440 | UUUCCCCAAUUUACAGGGA | 3464 | UCCCUGUAAAUUGGGGAAA |
| siRNA 441 | 441 | UUCCCCAAUUUACAGGGAA | 3465 | UUCCCUGUAAAUUGGGGAA |
| siRNA 442 | 442 | UCCCCAAUUUACAGGGAAA | 3466 | UUUCCCUGUAAAUUGGGGA |
| siRNA 443 | 443 | CCCCAAUUUACAGGGAAAA | 3467 | UUUUCCCUGUAAAUUGGGG |
| siRNA 444 | 444 | CCCAAUUUACAGGGAAAAA | 3468 | UUUUUCCCUGUAAAUUGGG |
| siRNA 445 | 445 | CCAAUUUACAGGGAAAAAC | 3469 | GUUUUUCCCUGUAAAUUGG |
| siRNA 446 | 446 | CAAUUUACAGGGAAAAACC | 3470 | GGUUUUUCCCUGUAAAUUG |
| siRNA 447 | 447 | AAUUUACAGGGAAAAACCG | 3471 | CGGUUUUUCCCUGUAAAUU |
| siRNA 448 | 448 | AUUUACAGGGAAAAACCGA | 3472 | UCGGUUUUUCCCUGUAAAU |
| siRNA 449 | 449 | UUUACAGGGAAAAACCGAA | 3473 | UUCGGUUUUUCCCUGUAAA |
| siRNA 450 | 450 | UUACAGGGAAAAACCGAAA | 3474 | UUUCGGUUUUUCCCUGUAA |
| siRNA 451 | 451 | UACAGGGAAAAACCGAAAU | 3475 | AUUUCGGUUUUUCCCUGUA |
| siRNA 452 | 452 | ACAGGGAAAAACCGAAAUU | 3476 | AAUUUCGGUUUUUCCCUGU |
| siRNA 453 | 453 | CAGGGAAAAACCGAAAUUC | 3477 | GAAUUUCGGUUUUUCCCUG |
| siRNA 454 | 454 | AGGGAAAAACCGAAAUUCA | 3478 | UGAAUUUCGGUUUUUCCCU |
| siRNA 455 | 455 | GGGAAAAACCGAAAUUCAG | 3479 | CUGAAUUUCGGUUUUUCCC |
| siRNA 456 | 456 | GGAAAAACCGAAAUUCAGA | 3480 | UCUGAAUUUCGGUUUUUCC |
| siRNA 457 | 457 | GAAAAACCGAAAUUCAGAA | 3481 | UUCUGAAUUUCGGUUUUUC |
| siRNA 458 | 458 | AAAAACCGAAAUUCAGAAA | 3482 | UUUCUGAAUUUCGGUUUUU |
| siRNA 459 | 459 | AAAACCGAAAUUCAGAAAA | 3483 | UUUUCUGAAUUUCGGUUUU |
| siRNA 460 | 460 | AAACCGAAAUUCAGAAAAG | 3484 | CUUUUCUGAAUUUCGGUUU |
| siRNA 461 | 461 | AACCGAAAUUCAGAAAAGU | 3485 | ACUUUUCUGAAUUUCGGUU |
| siRNA 462 | 462 | ACCGAAAUUCAGAAAAGUU | 3486 | AACUUUUCUGAAUUUCGGU |
| siRNA 463 | 463 | CCGAAAUUCAGAAAAGUUU | 3487 | AAACUUUUCUGAAUUUCGG |
| siRNA 464 | 464 | CGAAAUUCAGAAAAGUUUA | 3488 | UAAACUUUUCUGAAUUUCG |
| siRNA 465 | 465 | GAAAUUCAGAAAAGUUUAA | 3489 | UUAAACUUUUCUGAAUUUC |
| siRNA 466 | 466 | AAAUUCAGAAAAGUUUAAU | 3490 | AUUAAACUUUUCUGAAUUU |
| siRNA 467 | 467 | AAUUCAGAAAAGUUUAAUG | 3491 | CAUUAAACUUUUCUGAAUU |
| siRNA 468 | 468 | AUUCAGAAAAGUUUAAUGU | 3492 | ACAUUAAACUUUUCUGAAU |
| siRNA 469 | 469 | UUCAGAAAAGUUUAAUGUC | 3493 | GACAUUAAACUUUUCUGAA |
| siRNA 470 | 470 | UCAGAAAAGUUUAAUGUCA | 3494 | UGACAUUAAACUUUUCUGA |
| siRNA 471 | 471 | CAGAAAAGUUUAAUGUCAC | 3495 | GUGACAUUAAACUUUUCUG |
| siRNA 472 | 472 | AGAAAAGUUUAAUGUCACC | 3496 | GGUGACAUUAAACUUUUCU |
| siRNA 473 | 473 | GAAAAGUUUAAUGUCACCC | 3497 | GGGUGACAUUAAACUUUUC |
| siRNA 474 | 474 | AAAAGUUUAAUGUCACCCA | 3498 | UGGGUGACAUUAAACUUUU |
| siRNA 475 | 475 | AAAGUUUAAUGUCACCCAG | 3499 | CUGGGUGACAUUAAACUUU |
| siRNA 476 | 476 | AAGUUUAAUGUCACCCAGG | 3500 | CCUGGGUGACAUUAAACUU |
| siRNA 477 | 477 | AGUUUAAUGUCACCCAGGG | 3501 | CCCUGGGUGACAUUAAACU |
| siRNA 478 | 478 | GUUUAAUGUCACCCAGGGG | 3502 | CCCCUGGGUGACAUUAAAC |
| siRNA 479 | 479 | UUUAAUGUCACCCAGGGGC | 3503 | GCCCCUGGGUGACAUUAAA |
| siRNA 480 | 480 | UUAAUGUCACCCAGGGGCU | 3504 | AGCCCCUGGGUGACAUUAA |
| siRNA 481 | 481 | UAAUGUCACCCAGGGGCUG | 3505 | CAGCCCCUGGGUGACAUUA |
| siRNA 482 | 482 | AAUGUCACCCAGGGGCUGG | 3506 | CCAGCCCCUGGGUGACAUU |
| siRNA 483 | 483 | AUGUCACCCAGGGGCUGGA | 3507 | UCCAGCCCCUGGGUGACAU |
| siRNA 484 | 484 | UGUCACCCAGGGGCUGGAG | 3508 | CUCCAGCCCCUGGGUGACA |
| siRNA 485 | 485 | GUCACCCAGGGGCUGGAGC | 3509 | GCUCCAGCCCCUGGGUGAC |
| siRNA 486 | 486 | UCACCCAGGGGCUGGAGCC | 3510 | GGCUCCAGCCCCUGGGUGA |
| siRNA 487 | 487 | CACCCAGGGGCUGGAGCCC | 3511 | GGGCUCCAGCCCCUGGGUG |
| siRNA 488 | 488 | ACCCAGGGGCUGGAGCCCA | 3512 | UGGGCUCCAGCCCCUGGGU |
| siRNA 489 | 489 | CCCAGGGGCUGGAGCCCAG | 3513 | CUGGGCUCCAGCCCCUGGG |
| siRNA 490 | 490 | CCAGGGGCUGGAGCCCAGA | 3514 | UCUGGGCUCCAGCCCCUGG |
| siRNA 491 | 491 | CAGGGGCUGGAGCCCAGAC | 3515 | GUCUGGGCUCCAGCCCCUG |
| siRNA 492 | 492 | AGGGGCUGGAGCCCAGACC | 3516 | GGUCUGGGCUCCAGCCCCU |
| siRNA 493 | 493 | GGGGCUGGAGCCCAGACCU | 3517 | AGGUCUGGGCUCCAGCCCC |
| siRNA 494 | 494 | GGGCUGGAGCCCAGACCUC | 3518 | GAGGUCUGGGCUCCAGCCC |
| siRNA 495 | 495 | GGCUGGAGCCCAGACCUCU | 3519 | AGAGGUCUGGGCUCCAGCC |
| siRNA 496 | 496 | GCUGGAGCCCAGACCUCUG | 3520 | CAGAGGUCUGGGCUCCAGC |
| siRNA 497 | 497 | CUGGAGCCCAGACCUCUGG | 3521 | CCAGAGGUCUGGGCUCCAG |
| siRNA 498 | 498 | UGGAGCCCAGACCUCUGGC | 3522 | GCCAGAGGUCUGGGCUCCA |
| siRNA 499 | 499 | GGAGCCCAGACCUCUGGCA | 3523 | UGCCAGAGGUCUGGGCUCC |
| siRNA 500 | 500 | GAGCCCAGACCUCUGGCAG | 3524 | CUGCCAGAGGUCUGGGCUC |
| siRNA 501 | 501 | AGCCCAGACCUCUGGCAGC | 3525 | GCUGCCAGAGGUCUGGGCU |
| siRNA 502 | 502 | GCCCAGACCUCUGGCAGCU | 3526 | AGCUGCCAGAGGUCUGGGC |
| siRNA 503 | 503 | CCCAGACCUCUGGCAGCUC | 3527 | GAGCUGCCAGAGGUCUGGG |
| siRNA 504 | 504 | CCAGACCUCUGGCAGCUCU | 3528 | AGAGCUGCCAGAGGUCUGG |
| siRNA 505 | 505 | CAGACCUCUGGCAGCUCUC | 3529 | GAGAGCUGCCAGAGGUCUG |
| siRNA 506 | 506 | AGACCUCUGGCAGCUCUCA | 3530 | UGAGAGCUGCCAGAGGUCU |
| siRNA 507 | 507 | GACCUCUGGCAGCUCUCAC | 3531 | GUGAGAGCUGCCAGAGGUC |
| siRNA 508 | 508 | ACCUCUGGCAGCUCUCACU | 3532 | AGUGAGAGCUGCCAGAGGU |
| siRNA 509 | 509 | CCUCUGGCAGCUCUCACUU | 3533 | AAGUGAGAGCUGCCAGAGG |
| siRNA 510 | 510 | CUCUGGCAGCUCUCACUUU | 3534 | AAAGUGAGAGCUGCCAGAG |
| siRNA 511 | 511 | UCUGGCAGCUCUCACUUUC | 3535 | GAAAGUGAGAGCUGCCAGA |
| siRNA 512 | 512 | CUGGCAGCUCUCACUUUCA | 3536 | UGAAAGUGAGAGCUGCCAG |
| siRNA 513 | 513 | UGGCAGCUCUCACUUUCAC | 3537 | GUGAAAGUGAGAGCUGCCA |
| siRNA 514 | 514 | GGCAGCUCUCACUUUCACA | 3538 | UGUGAAAGUGAGAGCUGCC |
| siRNA 515 | 515 | GCAGCUCUCACUUUCACAA | 3539 | UUGUGAAAGUGAGAGCUGC |
| siRNA 516 | 516 | CAGCUCUCACUUUCACAAU | 3540 | AUUGUGAAAGUGAGAGCUG |
| siRNA 517 | 517 | AGCUCUCACUUUCACAAUG | 3541 | CAUUGUGAAAGUGAGAGCU |
| siRNA 518 | 518 | GCUCUCACUUUCACAAUGC | 3542 | GCAUUGUGAAAGUGAGAGC |
| siRNA 519 | 519 | CUCUCACUUUCACAAUGCC | 3543 | GGCAUUGUGAAAGUGAGAG |
| siRNA 520 | 520 | UCUCACUUUCACAAUGCCC | 3544 | GGGCAUUGUGAAAGUGAGA |
| siRNA 521 | 521 | CUCACUUUCACAAUGCCCU | 3545 | AGGGCAUUGUGAAAGUGAG |
| siRNA 522 | 522 | UCACUUUCACAAUGCCCUU | 3546 | AAGGGCAUUGUGAAAGUGA |
| siRNA 523 | 523 | CACUUUCACAAUGCCCUUG | 3547 | CAAGGGCAUUGUGAAAGUG |
| siRNA 524 | 524 | ACUUUCACAAUGCCCUUGG | 3548 | CCAAGGGCAUUGUGAAAGU |
| siRNA 525 | 525 | CUUUCACAAUGCCCUUGGG | 3549 | CCCAAGGGCAUUGUGAAAG |
| siRNA 526 | 526 | UUUCACAAUGCCCUUGGGC | 3550 | GCCCAAGGGCAUUGUGAAA |
| siRNA 527 | 527 | UUCACAAUGCCCUUGGGCU | 3551 | AGCCCAAGGGCAUUGUGAA |
| siRNA 528 | 528 | UCACAAUGCCCUUGGGCUG | 3552 | CAGCCCAAGGGCAUUGUGA |
| siRNA 529 | 529 | CACAAUGCCCUUGGGCUGA | 3553 | UCAGCCCAAGGGCAUUGUG |
| siRNA 530 | 530 | ACAAUGCCCUUGGGCUGAC | 3554 | GUCAGCCCAAGGGCAUUGU |
| siRNA 531 | 531 | CAAUGCCCUUGGGCUGACU | 3555 | AGUCAGCCCAAGGGCAUUG |
| siRNA 532 | 532 | AAUGCCCUUGGGCUGACUA | 3556 | UAGUCAGCCCAAGGGCAUU |
| siRNA 533 | 533 | AUGCCCUUGGGCUGACUAG | 3557 | CUAGUCAGCCCAAGGGCAU |
| siRNA 534 | 534 | UGCCCUUGGGCUGACUAGG | 3558 | CCUAGUCAGCCCAAGGGCA |
| siRNA 535 | 535 | GCCCUUGGGCUGACUAGGC | 3559 | GCCUAGUCAGCCCAAGGGC |
| siRNA 536 | 536 | CCCUUGGGCUGACUAGGCU | 3560 | AGCCUAGUCAGCCCAAGGG |
| siRNA 537 | 537 | CCUUGGGCUGACUAGGCUG | 3561 | CAGCCUAGUCAGCCCAAGG |
| siRNA 538 | 538 | CUUGGGCUGACUAGGCUGC | 3562 | GCAGCCUAGUCAGCCCAAG |
| siRNA 539 | 539 | UUGGGCUGACUAGGCUGCA | 3563 | UGCAGCCUAGUCAGCCCAA |
| siRNA 540 | 540 | UGGGCUGACUAGGCUGCAG | 3564 | CUGCAGCCUAGUCAGCCCA |
| siRNA 541 | 541 | GGGCUGACUAGGCUGCAGA | 3565 | UCUGCAGCCUAGUCAGCCC |
| siRNA 542 | 542 | GGCUGACUAGGCUGCAGAG | 3566 | CUCUGCAGCCUAGUCAGCC |
| siRNA 543 | 543 | GCUGACUAGGCUGCAGAGG | 3567 | CCUCUGCAGCCUAGUCAGC |
| siRNA 544 | 544 | CUGACUAGGCUGCAGAGGG | 3568 | CCCUCUGCAGCCUAGUCAG |
| siRNA 545 | 545 | UGACUAGGCUGCAGAGGGG | 3569 | CCCCUCUGCAGCCUAGUCA |
| siRNA 546 | 546 | GACUAGGCUGCAGAGGGGU | 3570 | ACCCCUCUGCAGCCUAGUC |
| siRNA 547 | 547 | ACUAGGCUGCAGAGGGGUU | 3571 | AACCCCUCUGCAGCCUAGU |
| siRNA 548 | 548 | CUAGGCUGCAGAGGGGUUU | 3572 | AAACCCCUCUGCAGCCUAG |
| siRNA 549 | 549 | UAGGCUGCAGAGGGGUUUC | 3573 | GAAACCCCUCUGCAGCCUA |
| siRNA 550 | 550 | AGGCUGCAGAGGGGUUUCA | 3574 | UGAAACCCCUCUGCAGCCU |
| siRNA 551 | 551 | GGCUGCAGAGGGGUUUCAC | 3575 | GUGAAACCCCUCUGCAGCC |
| siRNA 552 | 552 | GCUGCAGAGGGGUUUCACC | 3576 | GGUGAAACCCCUCUGCAGC |
| siRNA 553 | 553 | CUGCAGAGGGGUUUCACCC | 3577 | GGGUGAAACCCCUCUGCAG |
| siRNA 554 | 554 | UGCAGAGGGGUUUCACCCC | 3578 | GGGGUGAAACCCCUCUGCA |
| siRNA 555 | 555 | GCAGAGGGGUUUCACCCCA | 3579 | UGGGGUGAAACCCCUCUGC |
| siRNA 556 | 556 | CAGAGGGGUUUCACCCCAA | 3580 | UUGGGGUGAAACCCCUCUG |
| siRNA 557 | 557 | AGAGGGGUUUCACCCCAAC | 3581 | GUUGGGGUGAAACCCCUCU |
| siRNA 558 | 558 | GAGGGGUUUCACCCCAACC | 3582 | GGUUGGGGUGAAACCCCUC |
| siRNA 559 | 559 | AGGGGUUUCACCCCAACCC | 3583 | GGGUUGGGGUGAAACCCCU |
| siRNA 560 | 560 | GGGGUUUCACCCCAACCCC | 3584 | GGGGUUGGGGUGAAACCCC |
| siRNA 561 | 561 | GGGUUUCACCCCAACCCCA | 3585 | UGGGGUUGGGGUGAAACCC |
| siRNA 562 | 562 | GGUUUCACCCCAACCCCAG | 3586 | CUGGGGUUGGGGUGAAACC |
| siRNA 563 | 563 | GUUUCACCCCAACCCCAGG | 3587 | CCUGGGGUUGGGGUGAAAC |
| siRNA 564 | 564 | UUUCACCCCAACCCCAGGG | 3588 | CCCUGGGGUUGGGGUGAAA |
| siRNA 565 | 565 | UUCACCCCAACCCCAGGGC | 3589 | GCCCUGGGGUUGGGGUGAA |
| siRNA 566 | 566 | UCACCCCAACCCCAGGGCA | 3590 | UGCCCUGGGGUUGGGGUGA |
| siRNA 567 | 567 | CACCCCAACCCCAGGGCAC | 3591 | GUGCCCUGGGGUUGGGGUG |
| siRNA 568 | 568 | ACCCCAACCCCAGGGCACC | 3592 | GGUGCCCUGGGGUUGGGGU |
| siRNA 569 | 569 | CCCCAACCCCAGGGCACCU | 3593 | AGGUGCCCUGGGGUUGGGG |
| siRNA 570 | 570 | CCCAACCCCAGGGCACCUC | 3594 | GAGGUGCCCUGGGGUUGGG |
| siRNA 571 | 571 | CCAACCCCAGGGCACCUCA | 3595 | UGAGGUGCCCUGGGGUUGG |
| siRNA 572 | 572 | CAACCCCAGGGCACCUCAA | 3596 | UUGAGGUGCCCUGGGGUUG |
| siRNA 573 | 573 | AACCCCAGGGCACCUCAAG | 3597 | CUUGAGGUGCCCUGGGGUU |
| siRNA 574 | 574 | ACCCCAGGGCACCUCAAGU | 3598 | ACUUGAGGUGCCCUGGGGU |
| siRNA 575 | 575 | CCCCAGGGCACCUCAAGUG | 3599 | CACUUGAGGUGCCCUGGGG |
| siRNA 576 | 576 | CCCAGGGCACCUCAAGUGU | 3600 | ACACUUGAGGUGCCCUGGG |
| siRNA 577 | 577 | CCAGGGCACCUCAAGUGUC | 3601 | GACACUUGAGGUGCCCUGG |
| siRNA 578 | 578 | CAGGGCACCUCAAGUGUCC | 3602 | GGACACUUGAGGUGCCCUG |
| siRNA 579 | 579 | AGGGCACCUCAAGUGUCCC | 3603 | GGGACACUUGAGGUGCCCU |
| siRNA 580 | 580 | GGGCACCUCAAGUGUCCCC | 3604 | GGGGACACUUGAGGUGCCC |
| siRNA 581 | 581 | GGCACCUCAAGUGUCCCCA | 3605 | UGGGGACACUUGAGGUGCC |
| siRNA 582 | 582 | GCACCUCAAGUGUCCCCAC | 3606 | GUGGGGACACUUGAGGUGC |
| siRNA 583 | 583 | CACCUCAAGUGUCCCCACC | 3607 | GGUGGGGACACUUGAGGUG |
| siRNA 584 | 584 | ACCUCAAGUGUCCCCACCA | 3608 | UGGUGGGGACACUUGAGGU |
| siRNA 585 | 585 | CCUCAAGUGUCCCCACCAA | 3609 | UUGGUGGGGACACUUGAGG |
| siRNA 586 | 586 | CUCAAGUGUCCCCACCAAA | 3610 | UUUGGUGGGGACACUUGAG |
| siRNA 587 | 587 | UCAAGUGUCCCCACCAAAC | 3611 | GUUUGGUGGGGACACUUGA |
| siRNA 588 | 588 | CAAGUGUCCCCACCAAACC | 3612 | GGUUUGGUGGGGACACUUG |
| siRNA 589 | 589 | AAGUGUCCCCACCAAACCU | 3613 | AGGUUUGGUGGGGACACUU |
| siRNA 590 | 590 | AGUGUCCCCACCAAACCUU | 3614 | AAGGUUUGGUGGGGACACU |
| siRNA 591 | 591 | GUGUCCCCACCAAACCUUC | 3615 | GAAGGUUUGGUGGGGACAC |
| siRNA 592 | 592 | UGUCCCCACCAAACCUUCC | 3616 | GGAAGGUUUGGUGGGGACA |
| siRNA 593 | 593 | GUCCCCACCAAACCUUCCU | 3617 | AGGAAGGUUUGGUGGGGAC |
| siRNA 594 | 594 | UCCCCACCAAACCUUCCUA | 3618 | UAGGAAGGUUUGGUGGGGA |
| siRNA 595 | 595 | CCCCACCAAACCUUCCUAA | 3619 | UUAGGAAGGUUUGGUGGGG |
| siRNA 596 | 596 | CCCACCAAACCUUCCUAAC | 3620 | GUUAGGAAGGUUUGGUGGG |
| siRNA 597 | 597 | CCACCAAACCUUCCUAACA | 3621 | UGUUAGGAAGGUUUGGUGG |
| siRNA 598 | 598 | CACCAAACCUUCCUAACAC | 3622 | GUGUUAGGAAGGUUUGGUG |
| siRNA 599 | 599 | ACCAAACCUUCCUAACACC | 3623 | GGUGUUAGGAAGGUUUGGU |
| siRNA 600 | 600 | CCAAACCUUCCUAACACCU | 3624 | AGGUGUUAGGAAGGUUUGG |
| siRNA 601 | 601 | CAAACCUUCCUAACACCUG | 3625 | CAGGUGUUAGGAAGGUUUG |
| siRNA 602 | 602 | AAACCUUCCUAACACCUGU | 3626 | ACAGGUGUUAGGAAGGUUU |
| siRNA 603 | 603 | AACCUUCCUAACACCUGUC | 3627 | GACAGGUGUUAGGAAGGUU |
| siRNA 604 | 604 | ACCUUCCUAACACCUGUCC | 3628 | GGACAGGUGUUAGGAAGGU |
| siRNA 605 | 605 | CCUUCCUAACACCUGUCCA | 3629 | UGGACAGGUGUUAGGAAGG |
| siRNA 606 | 606 | CUUCCUAACACCUGUCCAC | 3630 | GUGGACAGGUGUUAGGAAG |
| siRNA 607 | 607 | UUCCUAACACCUGUCCACU | 3631 | AGUGGACAGGUGUUAGGAA |
| siRNA 608 | 608 | UCCUAACACCUGUCCACUA | 3632 | UAGUGGACAGGUGUUAGGA |
| siRNA 609 | 609 | CCUAACACCUGUCCACUAA | 3633 | UUAGUGGACAGGUGUUAGG |
| siRNA 610 | 610 | CUAACACCUGUCCACUAAG | 3634 | CUUAGUGGACAGGUGUUAG |
| siRNA 611 | 611 | UAACACCUGUCCACUAAGC | 3635 | GCUUAGUGGACAGGUGUUA |
| siRNA 612 | 612 | AACACCUGUCCACUAAGCU | 3636 | AGCUUAGUGGACAGGUGUU |
| siRNA 613 | 613 | ACACCUGUCCACUAAGCUG | 3637 | CAGCUUAGUGGACAGGUGU |
| siRNA 614 | 614 | CACCUGUCCACUAAGCUGU | 3638 | ACAGCUUAGUGGACAGGUG |
| siRNA 615 | 615 | ACCUGUCCACUAAGCUGUA | 3639 | UACAGCUUAGUGGACAGGU |
| siRNA 616 | 616 | CCUGUCCACUAAGCUGUAC | 3640 | GUACAGCUUAGUGGACAGG |
| siRNA 617 | 617 | CUGUCCACUAAGCUGUACU | 3641 | AGUACAGCUUAGUGGACAG |
| siRNA 618 | 618 | UGUCCACUAAGCUGUACUA | 3642 | UAGUACAGCUUAGUGGACA |
| siRNA 619 | 619 | GUCCACUAAGCUGUACUAG | 3643 | CUAGUACAGCUUAGUGGAC |
| siRNA 620 | 620 | UCCACUAAGCUGUACUAGG | 3644 | CCUAGUACAGCUUAGUGGA |
| siRNA 621 | 621 | CCACUAAGCUGUACUAGGC | 3645 | GCCUAGUACAGCUUAGUGG |
| siRNA 622 | 622 | CACUAAGCUGUACUAGGCC | 3646 | GGCCUAGUACAGCUUAGUG |
| siRNA 623 | 623 | ACUAAGCUGUACUAGGCCC | 3647 | GGGCCUAGUACAGCUUAGU |
| siRNA 624 | 624 | CUAAGCUGUACUAGGCCCU | 3648 | AGGGCCUAGUACAGCUUAG |
| siRNA 625 | 625 | UAAGCUGUACUAGGCCCUU | 3649 | AAGGGCCUAGUACAGCUUA |
| siRNA 626 | 626 | AAGCUGUACUAGGCCCUUG | 3650 | CAAGGGCCUAGUACAGCUU |
| siRNA 627 | 627 | AGCUGUACUAGGCCCUUGC | 3651 | GCAAGGGCCUAGUACAGCU |
| siRNA 628 | 628 | GCUGUACUAGGCCCUUGCA | 3652 | UGCAAGGGCCUAGUACAGC |
| siRNA 629 | 629 | CUGUACUAGGCCCUUGCAA | 3653 | UUGCAAGGGCCUAGUACAG |
| siRNA 630 | 630 | UGUACUAGGCCCUUGCAAC | 3654 | GUUGCAAGGGCCUAGUACA |
| siRNA 631 | 631 | GUACUAGGCCCUUGCAACU | 3655 | AGUUGCAAGGGCCUAGUAC |
| siRNA 632 | 632 | UACUAGGCCCUUGCAACUG | 3656 | CAGUUGCAAGGGCCUAGUA |
| siRNA 633 | 633 | ACUAGGCCCUUGCAACUGA | 3657 | UCAGUUGCAAGGGCCUAGU |
| siRNA 634 | 634 | CUAGGCCCUUGCAACUGAC | 3658 | GUCAGUUGCAAGGGCCUAG |
| siRNA 635 | 635 | UAGGCCCUUGCAACUGACC | 3659 | GGUCAGUUGCAAGGGCCUA |
| siRNA 636 | 636 | AGGCCCUUGCAACUGACCU | 3660 | AGGUCAGUUGCAAGGGCCU |
| siRNA 637 | 637 | GGCCCUUGCAACUGACCUA | 3661 | UAGGUCAGUUGCAAGGGCC |
| siRNA 638 | 638 | GCCCUUGCAACUGACCUAU | 3662 | AUAGGUCAGUUGCAAGGGC |
| siRNA 639 | 639 | CCCUUGCAACUGACCUAUG | 3663 | CAUAGGUCAGUUGCAAGGG |
| siRNA 640 | 640 | CCUUGCAACUGACCUAUGG | 3664 | CCAUAGGUCAGUUGCAAGG |
| siRNA 641 | 641 | CUUGCAACUGACCUAUGGG | 3665 | CCCAUAGGUCAGUUGCAAG |
| siRNA 642 | 642 | UUGCAACUGACCUAUGGGA | 3666 | UCCCAUAGGUCAGUUGCAA |
| siRNA 643 | 643 | UGCAACUGACCUAUGGGAC | 3667 | GUCCCAUAGGUCAGUUGCA |
| siRNA 644 | 644 | GCAACUGACCUAUGGGACC | 3668 | GGUCCCAUAGGUCAGUUGC |
| siRNA 645 | 645 | CAACUGACCUAUGGGACCU | 3669 | AGGUCCCAUAGGUCAGUUG |
| siRNA 646 | 646 | AACUGACCUAUGGGACCUG | 3670 | CAGGUCCCAUAGGUCAGUU |
| siRNA 647 | 647 | ACUGACCUAUGGGACCUGA | 3671 | UCAGGUCCCAUAGGUCAGU |
| siRNA 648 | 648 | CUGACCUAUGGGACCUGAG | 3672 | CUCAGGUCCCAUAGGUCAG |
| siRNA 649 | 649 | UGACCUAUGGGACCUGAGG | 3673 | CCUCAGGUCCCAUAGGUCA |
| siRNA 650 | 650 | GACCUAUGGGACCUGAGGC | 3674 | GCCUCAGGUCCCAUAGGUC |
| siRNA 651 | 651 | ACCUAUGGGACCUGAGGCC | 3675 | GGCCUCAGGUCCCAUAGGU |
| siRNA 652 | 652 | CCUAUGGGACCUGAGGCCU | 3676 | AGGCCUCAGGUCCCAUAGG |
| siRNA 653 | 653 | CUAUGGGACCUGAGGCCUG | 3677 | CAGGCCUCAGGUCCCAUAG |
| siRNA 654 | 654 | UAUGGGACCUGAGGCCUGG | 3678 | CCAGGCCUCAGGUCCCAUA |
| siRNA 655 | 655 | AUGGGACCUGAGGCCUGGC | 3679 | GCCAGGCCUCAGGUCCCAU |
| siRNA 656 | 656 | UGGGACCUGAGGCCUGGCC | 3680 | GGCCAGGCCUCAGGUCCCA |
| siRNA 657 | 657 | GGGACCUGAGGCCUGGCCC | 3681 | GGGCCAGGCCUCAGGUCCC |
| siRNA 658 | 658 | GGACCUGAGGCCUGGCCCC | 3682 | GGGGCCAGGCCUCAGGUCC |
| siRNA 659 | 659 | GACCUGAGGCCUGGCCCCU | 3683 | AGGGGCCAGGCCUCAGGUC |
| siRNA 660 | 660 | ACCUGAGGCCUGGCCCCUC | 3684 | GAGGGGCCAGGCCUCAGGU |
| siRNA 661 | 661 | CCUGAGGCCUGGCCCCUCA | 3685 | UGAGGGGCCAGGCCUCAGG |
| siRNA 662 | 662 | CUGAGGCCUGGCCCCUCAU | 3686 | AUGAGGGGCCAGGCCUCAG |
| siRNA 663 | 663 | UGAGGCCUGGCCCCUCAUG | 3687 | CAUGAGGGGCCAGGCCUCA |
| siRNA 664 | 664 | GAGGCCUGGCCCCUCAUGG | 3688 | CCAUGAGGGGCCAGGCCUC |
| siRNA 665 | 665 | AGGCCUGGCCCCUCAUGGC | 3689 | GCCAUGAGGGGCCAGGCCU |
| siRNA 666 | 666 | GGCCUGGCCCCUCAUGGCU | 3690 | AGCCAUGAGGGGCCAGGCC |
| siRNA 667 | 667 | GCCUGGCCCCUCAUGGCUC | 3691 | GAGCCAUGAGGGGCCAGGC |
| siRNA 668 | 668 | CCUGGCCCCUCAUGGCUCC | 3692 | GGAGCCAUGAGGGGCCAGG |
| siRNA 669 | 669 | CUGGCCCCUCAUGGCUCCU | 3693 | AGGAGCCAUGAGGGGCCAG |
| siRNA 670 | 670 | UGGCCCCUCAUGGCUCCUG | 3694 | CAGGAGCCAUGAGGGGCCA |
| siRNA 671 | 671 | GGCCCCUCAUGGCUCCUGU | 3695 | ACAGGAGCCAUGAGGGGCC |
| siRNA 672 | 672 | GCCCCUCAUGGCUCCUGUC | 3696 | GACAGGAGCCAUGAGGGGC |
| siRNA 673 | 673 | CCCCUCAUGGCUCCUGUCA | 3697 | UGACAGGAGCCAUGAGGGG |
| siRNA 674 | 674 | CCCUCAUGGCUCCUGUCAC | 3698 | GUGACAGGAGCCAUGAGGG |
| siRNA 675 | 675 | CCUCAUGGCUCCUGUCACC | 3699 | GGUGACAGGAGCCAUGAGG |
| siRNA 676 | 676 | CUCAUGGCUCCUGUCACCA | 3700 | UGGUGACAGGAGCCAUGAG |
| siRNA 677 | 677 | UCAUGGCUCCUGUCACCAG | 3701 | CUGGUGACAGGAGCCAUGA |
| siRNA 678 | 678 | CAUGGCUCCUGUCACCAGG | 3702 | CCUGGUGACAGGAGCCAUG |
| siRNA 679 | 679 | AUGGCUCCUGUCACCAGGU | 3703 | ACCUGGUGACAGGAGCCAU |
| siRNA 680 | 680 | UGGCUCCUGUCACCAGGUC | 3704 | GACCUGGUGACAGGAGCCA |
| siRNA 681 | 681 | GGCUCCUGUCACCAGGUCU | 3705 | AGACCUGGUGACAGGAGCC |
| siRNA 682 | 682 | GCUCCUGUCACCAGGUCUC | 3706 | GAGACCUGGUGACAGGAGC |
| siRNA 683 | 683 | CUCCUGUCACCAGGUCUCA | 3707 | UGAGACCUGGUGACAGGAG |
| siRNA 684 | 684 | UCCUGUCACCAGGUCUCAG | 3708 | CUGAGACCUGGUGACAGGA |
| siRNA 685 | 685 | CCUGUCACCAGGUCUCAGG | 3709 | CCUGAGACCUGGUGACAGG |
| siRNA 686 | 686 | CUGUCACCAGGUCUCAGGU | 3710 | ACCUGAGACCUGGUGACAG |
| siRNA 687 | 687 | UGUCACCAGGUCUCAGGUC | 3711 | GACCUGAGACCUGGUGACA |
| siRNA 688 | 688 | GUCACCAGGUCUCAGGUCA | 3712 | UGACCUGAGACCUGGUGAC |
| siRNA 689 | 689 | UCACCAGGUCUCAGGUCAG | 3713 | CUGACCUGAGACCUGGUGA |
| siRNA 690 | 690 | CACCAGGUCUCAGGUCAGG | 3714 | CCUGACCUGAGACCUGGUG |
| siRNA 691 | 691 | ACCAGGUCUCAGGUCAGGG | 3715 | CCCUGACCUGAGACCUGGU |
| siRNA 692 | 692 | CCAGGUCUCAGGUCAGGGU | 3716 | ACCCUGACCUGAGACCUGG |
| siRNA 693 | 693 | CAGGUCUCAGGUCAGGGUC | 3717 | GACCCUGACCUGAGACCUG |
| siRNA 694 | 694 | AGGUCUCAGGUCAGGGUCC | 3718 | GGACCCUGACCUGAGACCU |
| siRNA 695 | 695 | GGUCUCAGGUCAGGGUCCA | 3719 | UGGACCCUGACCUGAGACC |
| siRNA 696 | 696 | GUCUCAGGUCAGGGUCCAG | 3720 | CUGGACCCUGACCUGAGAC |
| siRNA 697 | 697 | UCUCAGGUCAGGGUCCAGC | 3721 | GCUGGACCCUGACCUGAGA |
| siRNA 698 | 698 | CUCAGGUCAGGGUCCAGCA | 3722 | UGCUGGACCCUGACCUGAG |
| siRNA 699 | 699 | UCAGGUCAGGGUCCAGCAG | 3723 | CUGCUGGACCCUGACCUGA |
| siRNA 700 | 700 | CAGGUCAGGGUCCAGCAGG | 3724 | CCUGCUGGACCCUGACCUG |
| siRNA 701 | 701 | AGGUCAGGGUCCAGCAGGC | 3725 | GCCUGCUGGACCCUGACCU |
| siRNA 702 | 702 | GGUCAGGGUCCAGCAGGCC | 3726 | GGCCUGCUGGACCCUGACC |
| siRNA 703 | 703 | GUCAGGGUCCAGCAGGCCC | 3727 | GGGCCUGCUGGACCCUGAC |
| siRNA 704 | 704 | UCAGGGUCCAGCAGGCCCU | 3728 | AGGGCCUGCUGGACCCUGA |
| siRNA 705 | 705 | CAGGGUCCAGCAGGCCCUG | 3729 | CAGGGCCUGCUGGACCCUG |
| siRNA 706 | 706 | AGGGUCCAGCAGGCCCUGA | 3730 | UCAGGGCCUGCUGGACCCU |
| siRNA 707 | 707 | GGGUCCAGCAGGCCCUGAG | 3731 | CUCAGGGCCUGCUGGACCC |
| siRNA 708 | 708 | GGUCCAGCAGGCCCUGAGC | 3732 | GCUCAGGGCCUGCUGGACC |
| siRNA 709 | 709 | GUCCAGCAGGCCCUGAGCU | 3733 | AGCUCAGGGCCUGCUGGAC |
| siRNA 710 | 710 | UCCAGCAGGCCCUGAGCUG | 3734 | CAGCUCAGGGCCUGCUGGA |
| siRNA 711 | 711 | CCAGCAGGCCCUGAGCUGA | 3735 | UCAGCUCAGGGCCUGCUGG |
| siRNA 712 | 712 | CAGCAGGCCCUGAGCUGAC | 3736 | GUCAGCUCAGGGCCUGCUG |
| siRNA 713 | 713 | AGCAGGCCCUGAGCUGACG | 3737 | CGUCAGCUCAGGGCCUGCU |
| siRNA 714 | 714 | GCAGGCCCUGAGCUGACGU | 3738 | ACGUCAGCUCAGGGCCUGC |
| siRNA 715 | 715 | CAGGCCCUGAGCUGACGUG | 3739 | CACGUCAGCUCAGGGCCUG |
| siRNA 716 | 716 | AGGCCCUGAGCUGACGUGU | 3740 | ACACGUCAGCUCAGGGCCU |
| siRNA 717 | 717 | GGCCCUGAGCUGACGUGUG | 3741 | CACACGUCAGCUCAGGGCC |
| siRNA 718 | 718 | GCCCUGAGCUGACGUGUGG | 3742 | CCACACGUCAGCUCAGGGC |
| siRNA 719 | 719 | CCCUGAGCUGACGUGUGGA | 3743 | UCCACACGUCAGCUCAGGG |
| siRNA 720 | 720 | CCUGAGCUGACGUGUGGAG | 3744 | CUCCACACGUCAGCUCAGG |
| siRNA 721 | 721 | CUGAGCUGACGUGUGGAGC | 3745 | GCUCCACACGUCAGCUCAG |
| siRNA 722 | 722 | UGAGCUGACGUGUGGAGCC | 3746 | GGCUCCACACGUCAGCUCA |
| siRNA 723 | 723 | GAGCUGACGUGUGGAGCCA | 3747 | UGGCUCCACACGUCAGCUC |
| siRNA 724 | 724 | AGCUGACGUGUGGAGCCAG | 3748 | CUGGCUCCACACGUCAGCU |
| siRNA 725 | 725 | GCUGACGUGUGGAGCCAGA | 3749 | UCUGGCUCCACACGUCAGC |
| siRNA 726 | 726 | CUGACGUGUGGAGCCAGAG | 3750 | CUCUGGCUCCACACGUCAG |
| siRNA 727 | 727 | UGACGUGUGGAGCCAGAGC | 3751 | GCUCUGGCUCCACACGUCA |
| siRNA 728 | 728 | GACGUGUGGAGCCAGAGCC | 3752 | GGCUCUGGCUCCACACGUC |
| siRNA 729 | 729 | ACGUGUGGAGCCAGAGCCA | 3753 | UGGCUCUGGCUCCACACGU |
| siRNA 730 | 730 | CGUGUGGAGCCAGAGCCAC | 3754 | GUGGCUCUGGCUCCACACG |
| siRNA 731 | 731 | GUGUGGAGCCAGAGCCACC | 3755 | GGUGGCUCUGGCUCCACAC |
| siRNA 732 | 732 | UGUGGAGCCAGAGCCACCC | 3756 | GGGUGGCUCUGGCUCCACA |
| siRNA 733 | 733 | GUGGAGCCAGAGCCACCCA | 3757 | UGGGUGGCUCUGGCUCCAC |
| siRNA 734 | 734 | UGGAGCCAGAGCCACCCAA | 3758 | UUGGGUGGCUCUGGCUCCA |
| siRNA 735 | 735 | GGAGCCAGAGCCACCCAAU | 3759 | AUUGGGUGGCUCUGGCUCC |
| siRNA 736 | 736 | GAGCCAGAGCCACCCAAUC | 3760 | GAUUGGGUGGCUCUGGCUC |
| siRNA 737 | 737 | AGCCAGAGCCACCCAAUCC | 3761 | GGAUUGGGUGGCUCUGGCU |
| siRNA 738 | 738 | GCCAGAGCCACCCAAUCCC | 3762 | GGGAUUGGGUGGCUCUGGC |
| siRNA 739 | 739 | CCAGAGCCACCCAAUCCCG | 3763 | CGGGAUUGGGUGGCUCUGG |
| siRNA 740 | 740 | CAGAGCCACCCAAUCCCGU | 3764 | ACGGGAUUGGGUGGCUCUG |
| siRNA 741 | 741 | AGAGCCACCCAAUCCCGUA | 3765 | UACGGGAUUGGGUGGCUCU |
| siRNA 742 | 742 | GAGCCACCCAAUCCCGUAG | 3766 | CUACGGGAUUGGGUGGCUC |
| siRNA 743 | 743 | AGCCACCCAAUCCCGUAGG | 3767 | CCUACGGGAUUGGGUGGCU |
| siRNA 744 | 744 | GCCACCCAAUCCCGUAGGG | 3768 | CCCUACGGGAUUGGGUGGC |
| siRNA 745 | 745 | CCACCCAAUCCCGUAGGGA | 3769 | UCCCUACGGGAUUGGGUGG |
| siRNA 746 | 746 | CACCCAAUCCCGUAGGGAC | 3770 | GUCCCUACGGGAUUGGGUG |
| siRNA 747 | 747 | ACCCAAUCCCGUAGGGACA | 3771 | UGUCCCUACGGGAUUGGGU |
| siRNA 748 | 748 | CCCAAUCCCGUAGGGACAG | 3772 | CUGUCCCUACGGGAUUGGG |
| siRNA 749 | 749 | CCAAUCCCGUAGGGACAGG | 3773 | CCUGUCCCUACGGGAUUGG |
| siRNA 750 | 750 | CAAUCCCGUAGGGACAGGU | 3774 | ACCUGUCCCUACGGGAUUG |
| siRNA 751 | 751 | AAUCCCGUAGGGACAGGUU | 3775 | AACCUGUCCCUACGGGAUU |
| siRNA 752 | 752 | AUCCCGUAGGGACAGGUUU | 3776 | AAACCUGUCCCUACGGGAU |
| siRNA 753 | 753 | UCCCGUAGGGACAGGUUUC | 3777 | GAAACCUGUCCCUACGGGA |
| siRNA 754 | 754 | CCCGUAGGGACAGGUUUCA | 3778 | UGAAACCUGUCCCUACGGG |
| siRNA 755 | 755 | CCGUAGGGACAGGUUUCAC | 3779 | GUGAAACCUGUCCCUACGG |
| siRNA 756 | 756 | CGUAGGGACAGGUUUCACA | 3780 | UGUGAAACCUGUCCCUACG |
| siRNA 757 | 757 | GUAGGGACAGGUUUCACAA | 3781 | UUGUGAAACCUGUCCCUAC |
| siRNA 758 | 758 | UAGGGACAGGUUUCACAAC | 3782 | GUUGUGAAACCUGUCCCUA |
| siRNA 759 | 759 | AGGGACAGGUUUCACAACU | 3783 | AGUUGUGAAACCUGUCCCU |
| siRNA 760 | 760 | GGGACAGGUUUCACAACUU | 3784 | AAGUUGUGAAACCUGUCCC |
| siRNA 761 | 761 | GGACAGGUUUCACAACUUC | 3785 | GAAGUUGUGAAACCUGUCC |
| siRNA 762 | 762 | GACAGGUUUCACAACUUCC | 3786 | GGAAGUUGUGAAACCUGUC |
| siRNA 763 | 763 | ACAGGUUUCACAACUUCCC | 3787 | GGGAAGUUGUGAAACCUGU |
| siRNA 764 | 764 | CAGGUUUCACAACUUCCCG | 3788 | CGGGAAGUUGUGAAACCUG |
| siRNA 765 | 765 | AGGUUUCACAACUUCCCGG | 3789 | CCGGGAAGUUGUGAAACCU |
| siRNA 766 | 766 | GGUUUCACAACUUCCCGGA | 3790 | UCCGGGAAGUUGUGAAACC |
| siRNA 767 | 767 | GUUUCACAACUUCCCGGAU | 3791 | AUCCGGGAAGUUGUGAAAC |
| siRNA 768 | 768 | UUUCACAACUUCCCGGAUG | 3792 | CAUCCGGGAAGUUGUGAAA |
| siRNA 769 | 769 | UUCACAACUUCCCGGAUGG | 3793 | CCAUCCGGGAAGUUGUGAA |
| siRNA 770 | 770 | UCACAACUUCCCGGAUGGG | 3794 | CCCAUCCGGGAAGUUGUGA |
| siRNA 771 | 771 | CACAACUUCCCGGAUGGGG | 3795 | CCCCAUCCGGGAAGUUGUG |
| siRNA 772 | 772 | ACAACUUCCCGGAUGGGGC | 3796 | GCCCCAUCCGGGAAGUUGU |
| siRNA 773 | 773 | CAACUUCCCGGAUGGGGCU | 3797 | AGCCCCAUCCGGGAAGUUG |
| siRNA 774 | 774 | AACUUCCCGGAUGGGGCUG | 3798 | CAGCCCCAUCCGGGAAGUU |
| siRNA 775 | 775 | ACUUCCCGGAUGGGGCUGU | 3799 | ACAGCCCCAUCCGGGAAGU |
| siRNA 776 | 776 | CUUCCCGGAUGGGGCUGUG | 3800 | CACAGCCCCAUCCGGGAAG |
| siRNA 777 | 777 | UUCCCGGAUGGGGCUGUGG | 3801 | CCACAGCCCCAUCCGGGAA |
| siRNA 778 | 778 | UCCCGGAUGGGGCUGUGGU | 3802 | ACCACAGCCCCAUCCGGGA |
| siRNA 779 | 779 | CCCGGAUGGGGCUGUGGUG | 3803 | CACCACAGCCCCAUCCGGG |
| siRNA 780 | 780 | CCGGAUGGGGCUGUGGUGG | 3804 | CCACCACAGCCCCAUCCGG |
| siRNA 781 | 781 | CGGAUGGGGCUGUGGUGGG | 3805 | CCCACCACAGCCCCAUCCG |
| siRNA 782 | 782 | GGAUGGGGCUGUGGUGGGU | 3806 | ACCCACCACAGCCCCAUCC |
| siRNA 783 | 783 | GAUGGGGCUGUGGUGGGUC | 3807 | GACCCACCACAGCCCCAUC |
| siRNA 784 | 784 | AUGGGGCUGUGGUGGGUCA | 3808 | UGACCCACCACAGCCCCAU |
| siRNA 785 | 785 | UGGGGCUGUGGUGGGUCAC | 3809 | GUGACCCACCACAGCCCCA |
| siRNA 786 | 786 | GGGGCUGUGGUGGGUCACA | 3810 | UGUGACCCACCACAGCCCC |
| siRNA 787 | 787 | GGGCUGUGGUGGGUCACAG | 3811 | CUGUGACCCACCACAGCCC |
| siRNA 788 | 788 | GGCUGUGGUGGGUCACAGU | 3812 | ACUGUGACCCACCACAGCC |
| siRNA 789 | 789 | GCUGUGGUGGGUCACAGUG | 3813 | CACUGUGACCCACCACAGC |
| siRNA 790 | 790 | CUGUGGUGGGUCACAGUGC | 3814 | GCACUGUGACCCACCACAG |
| siRNA 791 | 791 | UGUGGUGGGUCACAGUGCA | 3815 | UGCACUGUGACCCACCACA |
| siRNA 792 | 792 | GUGGUGGGUCACAGUGCAG | 3816 | CUGCACUGUGACCCACCAC |
| siRNA 793 | 793 | UGGUGGGUCACAGUGCAGC | 3817 | GCUGCACUGUGACCCACCA |
| siRNA 794 | 794 | GGUGGGUCACAGUGCAGCC | 3818 | GGCUGCACUGUGACCCACC |
| siRNA 795 | 795 | GUGGGUCACAGUGCAGCCU | 3819 | AGGCUGCACUGUGACCCAC |
| siRNA 796 | 796 | UGGGUCACAGUGCAGCCUC | 3820 | GAGGCUGCACUGUGACCCA |
| siRNA 797 | 797 | GGGUCACAGUGCAGCCUCC | 3821 | GGAGGCUGCACUGUGACCC |
| siRNA 798 | 798 | GGUCACAGUGCAGCCUCCA | 3822 | UGGAGGCUGCACUGUGACC |
| siRNA 799 | 799 | GUCACAGUGCAGCCUCCAG | 3823 | CUGGAGGCUGCACUGUGAC |
| siRNA 800 | 800 | UCACAGUGCAGCCUCCAGC | 3824 | GCUGGAGGCUGCACUGUGA |
| siRNA 801 | 801 | CACAGUGCAGCCUCCAGCC | 3825 | GGCUGGAGGCUGCACUGUG |
| siRNA 802 | 802 | ACAGUGCAGCCUCCAGCCA | 3826 | UGGCUGGAGGCUGCACUGU |
| siRNA 803 | 803 | CAGUGCAGCCUCCAGCCAG | 3827 | CUGGCUGGAGGCUGCACUG |
| siRNA 804 | 804 | AGUGCAGCCUCCAGCCAGA | 3828 | UCUGGCUGGAGGCUGCACU |
| siRNA 805 | 805 | GUGCAGCCUCCAGCCAGAA | 3829 | UUCUGGCUGGAGGCUGCAC |
| siRNA 806 | 806 | UGCAGCCUCCAGCCAGAAG | 3830 | CUUCUGGCUGGAGGCUGCA |
| siRNA 807 | 807 | GCAGCCUCCAGCCAGAAGG | 3831 | CCUUCUGGCUGGAGGCUGC |
| siRNA 808 | 808 | CAGCCUCCAGCCAGAAGGA | 3832 | UCCUUCUGGCUGGAGGCUG |
| siRNA 809 | 809 | AGCCUCCAGCCAGAAGGAU | 3833 | AUCCUUCUGGCUGGAGGCU |
| siRNA 810 | 810 | GCCUCCAGCCAGAAGGAUG | 3834 | CAUCCUUCUGGCUGGAGGC |
| SiRNA 811 | 811 | CCUCCAGCCAGAAGGAUGG | 3835 | CCAUCCUUCUGGCUGGAGG |
| siRNA 812 | 812 | CUCCAGCCAGAAGGAUGGG | 3836 | CCCAUCCUUCUGGCUGGAG |
| siRNA 813 | 813 | UCCAGCCAGAAGGAUGGGG | 3837 | CCCCAUCCUUCUGGCUGGA |
| siRNA 814 | 814 | CCAGCCAGAAGGAUGGGGU | 3838 | ACCCCAUCCUUCUGGCUGG |
| siRNA 815 | 815 | CAGCCAGAAGGAUGGGGUG | 3839 | CACCCCAUCCUUCUGGCUG |
| siRNA 816 | 816 | AGCCAGAAGGAUGGGGUGG | 3840 | CCACCCCAUCCUUCUGGCU |
| siRNA 817 | 817 | GCCAGAAGGAUGGGGUGGC | 3841 | GCCACCCCAUCCUUCUGGC |
| siRNA 818 | 818 | CCAGAAGGAUGGGGUGGCU | 3842 | AGCCACCCCAUCCUUCUGG |
| siRNA 819 | 819 | CAGAAGGAUGGGGUGGCUC | 3843 | GAGCCACCCCAUCCUUCUG |
| siRNA 820 | 820 | AGAAGGAUGGGGUGGCUCC | 3844 | GGAGCCACCCCAUCCUUCU |
| siRNA 821 | 821 | GAAGGAUGGGGUGGCUCCC | 3845 | GGGAGCCACCCCAUCCUUC |
| siRNA 822 | 822 | AAGGAUGGGGUGGCUCCCA | 3846 | UGGGAGCCACCCCAUCCUU |
| siRNA 823 | 823 | AGGAUGGGGUGGCUCCCAC | 3847 | GUGGGAGCCACCCCAUCCU |
| siRNA 824 | 824 | GGAUGGGGUGGCUCCCACU | 3848 | AGUGGGAGCCACCCCAUCC |
| siRNA 825 | 825 | GAUGGGGUGGCUCCCACUC | 3849 | GAGUGGGAGCCACCCCAUC |
| siRNA 826 | 826 | AUGGGGUGGCUCCCACUCC | 3850 | GGAGUGGGAGCCACCCCAU |
| siRNA 827 | 827 | UGGGGUGGCUCCCACUCCU | 3851 | AGGAGUGGGAGCCACCCCA |
| siRNA 828 | 828 | GGGGUGGCUCCCACUCCUG | 3852 | CAGGAGUGGGAGCCACCCC |
| siRNA 829 | 829 | GGGUGGCUCCCACUCCUGC | 3853 | GCAGGAGUGGGAGCCACCC |
| siRNA 830 | 830 | GGUGGCUCCCACUCCUGCU | 3854 | AGCAGGAGUGGGAGCCACC |
| siRNA 831 | 831 | GUGGCUCCCACUCCUGCUG | 3855 | CAGCAGGAGUGGGAGCCAC |
| siRNA 832 | 832 | UGGCUCCCACUCCUGCUGC | 3856 | GCAGCAGGAGUGGGAGCCA |
| siRNA 833 | 833 | GGCUCCCACUCCUGCUGCU | 3857 | AGCAGCAGGAGUGGGAGCC |
| siRNA 834 | 834 | GCUCCCACUCCUGCUGCUU | 3858 | AAGCAGCAGGAGUGGGAGC |
| siRNA 835 | 835 | CUCCCACUCCUGCUGCUUC | 3859 | GAAGCAGCAGGAGUGGGAG |
| siRNA 836 | 836 | UCCCACUCCUGCUGCUUCU | 3860 | AGAAGCAGCAGGAGUGGGA |
| siRNA 837 | 837 | CCCACUCCUGCUGCUUCUG | 3861 | CAGAAGCAGCAGGAGUGGG |
| siRNA 838 | 838 | CCACUCCUGCUGCUUCUGA | 3862 | UCAGAAGCAGCAGGAGUGG |
| siRNA 839 | 839 | CACUCCUGCUGCUUCUGAC | 3863 | GUCAGAAGCAGCAGGAGUG |
| siRNA 840 | 840 | ACUCCUGCUGCUUCUGACU | 3864 | AGUCAGAAGCAGCAGGAGU |
| siRNA 841 | 841 | CUCCUGCUGCUUCUGACUC | 3865 | GAGUCAGAAGCAGCAGGAG |
| siRNA 842 | 842 | UCCUGCUGCUUCUGACUCA | 3866 | UGAGUCAGAAGCAGCAGGA |
| siRNA 843 | 843 | CCUGCUGCUUCUGACUCAA | 3867 | UUGAGUCAGAAGCAGCAGG |
| siRNA 844 | 844 | CUGCUGCUUCUGACUCAAU | 3868 | AUUGAGUCAGAAGCAGCAG |
| siRNA 845 | 845 | UGCUGCUUCUGACUCAAUG | 3869 | CAUUGAGUCAGAAGCAGCA |
| siRNA 846 | 846 | GCUGCUUCUGACUCAAUGC | 3870 | GCAUUGAGUCAGAAGCAGC |
| siRNA 847 | 847 | CUGCUUCUGACUCAAUGCU | 3871 | AGCAUUGAGUCAGAAGCAG |
| siRNA 848 | 848 | UGCUUCUGACUCAAUGCUU | 3872 | AAGCAUUGAGUCAGAAGCA |
| siRNA 849 | 849 | GCUUCUGACUCAAUGCUUA | 3873 | UAAGCAUUGAGUCAGAAGC |
| siRNA 850 | 850 | CUUCUGACUCAAUGCUUAG | 3874 | CUAAGCAUUGAGUCAGAAG |
| siRNA 851 | 851 | UUCUGACUCAAUGCUUAGG | 3875 | CCUAAGCAUUGAGUCAGAA |
| siRNA 852 | 852 | UCUGACUCAAUGCUUAGGG | 3876 | CCCUAAGCAUUGAGUCAGA |
| siRNA 853 | 853 | CUGACUCAAUGCUUAGGGG | 3877 | CCCCUAAGCAUUGAGUCAG |
| siRNA 854 | 854 | UGACUCAAUGCUUAGGGGU | 3878 | ACCCCUAAGCAUUGAGUCA |
| siRNA 855 | 855 | GACUCAAUGCUUAGGGGUC | 3879 | GACCCCUAAGCAUUGAGUC |
| siRNA 856 | 856 | ACUCAAUGCUUAGGGGUCC | 3880 | GGACCCCUAAGCAUUGAGU |
| siRNA 857 | 857 | CUCAAUGCUUAGGGGUCCC | 3881 | GGGACCCCUAAGCAUUGAG |
| siRNA 858 | 858 | UCAAUGCUUAGGGGUCCCU | 3882 | AGGGACCCCUAAGCAUUGA |
| siRNA 859 | 859 | CAAUGCUUAGGGGUCCCUG | 3883 | CAGGGACCCCUAAGCAUUG |
| siRNA 860 | 860 | AAUGCUUAGGGGUCCCUGG | 3884 | CCAGGGACCCCUAAGCAUU |
| siRNA 861 | 861 | AUGCUUAGGGGUCCCUGGG | 3885 | CCCAGGGACCCCUAAGCAU |
| siRNA 862 | 862 | UGCUUAGGGGUCCCUGGGC | 3886 | GCCCAGGGACCCCUAAGCA |
| siRNA 863 | 863 | GCUUAGGGGUCCCUGGGCA | 3887 | UGCCCAGGGACCCCUAAGC |
| siRNA 864 | 864 | CUUAGGGGUCCCUGGGCAG | 3888 | CUGCCCAGGGACCCCUAAG |
| siRNA 865 | 865 | UUAGGGGUCCCUGGGCAGC | 3889 | GCUGCCCAGGGACCCCUAA |
| siRNA 866 | 866 | UAGGGGUCCCUGGGCAGCG | 3890 | CGCUGCCCAGGGACCCCUA |
| siRNA 867 | 867 | AGGGGUCCCUGGGCAGCGC | 3891 | GCGCUGCCCAGGGACCCCU |
| siRNA 868 | 868 | GGGGUCCCUGGGCAGCGCU | 3892 | AGCGCUGCCCAGGGACCCC |
| siRNA 869 | 869 | GGGUCCCUGGGCAGCGCUC | 3893 | GAGCGCUGCCCAGGGACCC |
| siRNA 870 | 870 | GGUCCCUGGGCAGCGCUCG | 3894 | CGAGCGCUGCCCAGGGACC |
| siRNA 871 | 871 | GUCCCUGGGCAGCGCUCGC | 3895 | GCGAGCGCUGCCCAGGGAC |
| siRNA 872 | 872 | UCCCUGGGCAGCGCUCGCC | 3896 | GGCGAGCGCUGCCCAGGGA |
| siRNA 873 | 873 | CCCUGGGCAGCGCUCGCCA | 3897 | UGGCGAGCGCUGCCCAGGG |
| siRNA 874 | 874 | CCUGGGCAGCGCUCGCCAU | 3898 | AUGGCGAGCGCUGCCCAGG |
| siRNA 875 | 875 | CUGGGCAGCGCUCGCCAUU | 3899 | AAUGGCGAGCGCUGCCCAG |
| siRNA 876 | 876 | UGGGCAGCGCUCGCCAUUG | 3900 | CAAUGGCGAGCGCUGCCCA |
| siRNA 877 | 877 | GGGCAGCGCUCGCCAUUGA | 3901 | UCAAUGGCGAGCGCUGCCC |
| siRNA 878 | 878 | GGCAGCGCUCGCCAUUGAA | 3902 | UUCAAUGGCGAGCGCUGCC |
| siRNA 879 | 879 | GCAGCGCUCGCCAUUGAAU | 3903 | AUUCAAUGGCGAGCGCUGC |
| siRNA 880 | 880 | CAGCGCUCGCCAUUGAAUG | 3904 | CAUUCAAUGGCGAGCGCUG |
| siRNA 881 | 881 | AGCGCUCGCCAUUGAAUGA | 3905 | UCAUUCAAUGGCGAGCGCU |
| siRNA 882 | 882 | GCGCUCGCCAUUGAAUGAC | 3906 | GUCAUUCAAUGGCGAGCGC |
| SiRNA 883 | 883 | CGCUCGCCAUUGAAUGACU | 3907 | AGUCAUUCAAUGGCGAGCG |
| siRNA 884 | 884 | GCUCGCCAUUGAAUGACUU | 3908 | AAGUCAUUCAAUGGCGAGC |
| siRNA 885 | 885 | CUCGCCAUUGAAUGACUUC | 3909 | GAAGUCAUUCAAUGGCGAG |
| siRNA 886 | 886 | UCGCCAUUGAAUGACUUCC | 3910 | GGAAGUCAUUCAAUGGCGA |
| siRNA 887 | 887 | CGCCAUUGAAUGACUUCCA | 3911 | UGGAAGUCAUUCAAUGGCG |
| siRNA 888 | 888 | GCCAUUGAAUGACUUCCAA | 3912 | UUGGAAGUCAUUCAAUGGC |
| siRNA 889 | 889 | CCAUUGAAUGACUUCCAAG | 3913 | CUUGGAAGUCAUUCAAUGG |
| siRNA 890 | 890 | CAUUGAAUGACUUCCAAGU | 3914 | ACUUGGAAGUCAUUCAAUG |
| siRNA 891 | 891 | AUUGAAUGACUUCCAAGUG | 3915 | CACUUGGAAGUCAUUCAAU |
| siRNA 892 | 892 | UUGAAUGACUUCCAAGUGC | 3916 | GCACUUGGAAGUCAUUCAA |
| siRNA 893 | 893 | UGAAUGACUUCCAAGUGCU | 3917 | AGCACUUGGAAGUCAUUCA |
| siRNA 894 | 894 | GAAUGACUUCCAAGUGCUC | 3918 | GAGCACUUGGAAGUCAUUC |
| siRNA 895 | 895 | AAUGACUUCCAAGUGCUCC | 3919 | GGAGCACUUGGAAGUCAUU |
| siRNA 896 | 896 | AUGACUUCCAAGUGCUCCG | 3920 | CGGAGCACUUGGAAGUCAU |
| siRNA 897 | 897 | UGACUUCCAAGUGCUCCGG | 3921 | CCGGAGCACUUGGAAGUCA |
| siRNA 898 | 898 | GACUUCCAAGUGCUCCGGG | 3922 | CCCGGAGCACUUGGAAGUC |
| siRNA 899 | 899 | ACUUCCAAGUGCUCCGGGG | 3923 | CCCCGGAGCACUUGGAAGU |
| siRNA 900 | 900 | CUUCCAAGUGCUCCGGGGC | 3924 | GCCCCGGAGCACUUGGAAG |
| siRNA 901 | 901 | UUCCAAGUGCUCCGGGGCA | 3925 | UGCCCCGGAGCACUUGGAA |
| siRNA 902 | 902 | UCCAAGUGCUCCGGGGCAC | 3926 | GUGCCCCGGAGCACUUGGA |
| siRNA 903 | 903 | CCAAGUGCUCCGGGGCACA | 3927 | UGUGCCCCGGAGCACUUGG |
| siRNA 904 | 904 | CAAGUGCUCCGGGGCACAG | 3928 | CUGUGCCCCGGAGCACUUG |
| siRNA 905 | 905 | AAGUGCUCCGGGGCACAGA | 3929 | UCUGUGCCCCGGAGCACUU |
| siRNA 906 | 906 | AGUGCUCCGGGGCACAGAG | 3930 | CUCUGUGCCCCGGAGCACU |
| siRNA 907 | 907 | GUGCUCCGGGGCACAGAGC | 3931 | GCUCUGUGCCCCGGAGCAC |
| siRNA 908 | 908 | UGCUCCGGGGCACAGAGCU | 3932 | AGCUCUGUGCCCCGGAGCA |
| siRNA 909 | 909 | GCUCCGGGGCACAGAGCUA | 3933 | UAGCUCUGUGCCCCGGAGC |
| siRNA 910 | 910 | CUCCGGGGCACAGAGCUAC | 3934 | GUAGCUCUGUGCCCCGGAG |
| siRNA 911 | 911 | UCCGGGGCACAGAGCUACA | 3935 | UGUAGCUCUGUGCCCCGGA |
| siRNA 912 | 912 | CCGGGGCACAGAGCUACAG | 3936 | CUGUAGCUCUGUGCCCCGG |
| SiRNA 913 | 913 | CGGGGCACAGAGCUACAGC | 3937 | GCUGUAGCUCUGUGCCCCG |
| siRNA 914 | 914 | GGGGCACAGAGCUACAGCA | 3938 | UGCUGUAGCUCUGUGCCCC |
| siRNA 915 | 915 | GGGCACAGAGCUACAGCAC | 3939 | GUGCUGUAGCUCUGUGCCC |
| siRNA 916 | 916 | GGCACAGAGCUACAGCACC | 3940 | GGUGCUGUAGCUCUGUGCC |
| siRNA 917 | 917 | GCACAGAGCUACAGCACCU | 3941 | AGGUGCUGUAGCUCUGUGC |
| siRNA 918 | 918 | CACAGAGCUACAGCACCUG | 3942 | CAGGUGCUGUAGCUCUGUG |
| siRNA 919 | 919 | ACAGAGCUACAGCACCUGC | 3943 | GCAGGUGCUGUAGCUCUGU |
| siRNA 920 | 920 | CAGAGCUACAGCACCUGCU | 3944 | AGCAGGUGCUGUAGCUCUG |
| siRNA 921 | 921 | AGAGCUACAGCACCUGCUA | 3945 | UAGCAGGUGCUGUAGCUCU |
| siRNA 922 | 922 | GAGCUACAGCACCUGCUAC | 3946 | GUAGCAGGUGCUGUAGCUC |
| siRNA 923 | 923 | AGCUACAGCACCUGCUACA | 3947 | UGUAGCAGGUGCUGUAGCU |
| siRNA 924 | 924 | GCUACAGCACCUGCUACAU | 3948 | AUGUAGCAGGUGCUGUAGC |
| siRNA 925 | 925 | CUACAGCACCUGCUACAUG | 3949 | CAUGUAGCAGGUGCUGUAG |
| siRNA 926 | 926 | UACAGCACCUGCUACAUGC | 3950 | GCAUGUAGCAGGUGCUGUA |
| siRNA 927 | 927 | ACAGCACCUGCUACAUGCG | 3951 | CGCAUGUAGCAGGUGCUGU |
| siRNA 928 | 928 | CAGCACCUGCUACAUGCGG | 3952 | CCGCAUGUAGCAGGUGCUG |
| siRNA 929 | 929 | AGCACCUGCUACAUGCGGU | 3953 | ACCGCAUGUAGCAGGUGCU |
| siRNA 930 | 930 | GCACCUGCUACAUGCGGUG | 3954 | CACCGCAUGUAGCAGGUGC |
| siRNA 931 | 931 | CACCUGCUACAUGCGGUGG | 3955 | CCACCGCAUGUAGCAGGUG |
| siRNA 932 | 932 | ACCUGCUACAUGCGGUGGU | 3956 | ACCACCGCAUGUAGCAGGU |
| siRNA 933 | 933 | CCUGCUACAUGCGGUGGUG | 3957 | CACCACCGCAUGUAGCAGG |
| siRNA 934 | 934 | CUGCUACAUGCGGUGGUGC | 3958 | GCACCACCGCAUGUAGCAG |
| siRNA 935 | 935 | UGCUACAUGCGGUGGUGCC | 3959 | GGCACCACCGCAUGUAGCA |
| siRNA 936 | 936 | GCUACAUGCGGUGGUGCCC | 3960 | GGGCACCACCGCAUGUAGC |
| siRNA 937 | 937 | CUACAUGCGGUGGUGCCCG | 3961 | CGGGCACCACCGCAUGUAG |
| siRNA 938 | 938 | UACAUGCGGUGGUGCCCGG | 3962 | CCGGGCACCACCGCAUGUA |
| siRNA 939 | 939 | ACAUGCGGUGGUGCCCGGG | 3963 | CCCGGGCACCACCGCAUGU |
| siRNA 940 | 940 | CAUGCGGUGGUGCCCGGGC | 3964 | GCCCGGGCACCACCGCAUG |
| siRNA 941 | 941 | AUGCGGUGGUGCCCGGGCC | 3965 | GGCCCGGGCACCACCGCAU |
| siRNA 942 | 942 | UGCGGUGGUGCCCGGGCCU | 3966 | AGGCCCGGGCACCACCGCA |
| siRNA 943 | 943 | GCGGUGGUGCCCGGGCCUU | 3967 | AAGGCCCGGGCACCACCGC |
| siRNA 944 | 944 | CGGUGGUGCCCGGGCCUUG | 3968 | CAAGGCCCGGGCACCACCG |
| siRNA 945 | 945 | GGUGGUGCCCGGGCCUUGG | 3969 | CCAAGGCCCGGGCACCACC |
| siRNA 946 | 946 | GUGGUGCCCGGGCCUUGGC | 3970 | GCCAAGGCCCGGGCACCAC |
| siRNA 947 | 947 | UGGUGCCCGGGCCUUGGCA | 3971 | UGCCAAGGCCCGGGCACCA |
| siRNA 948 | 948 | GGUGCCCGGGCCUUGGCAG | 3972 | CUGCCAAGGCCCGGGCACC |
| siRNA 949 | 949 | GUGCCCGGGCCUUGGCAGG | 3973 | CCUGCCAAGGCCCGGGCAC |
| siRNA 950 | 950 | UGCCCGGGCCUUGGCAGGA | 3974 | UCCUGCCAAGGCCCGGGCA |
| siRNA 951 | 951 | GCCCGGGCCUUGGCAGGAG | 3975 | CUCCUGCCAAGGCCCGGGC |
| siRNA 952 | 952 | CCCGGGCCUUGGCAGGAGG | 3976 | CCUCCUGCCAAGGCCCGGG |
| siRNA 953 | 953 | CCGGGCCUUGGCAGGAGGA | 3977 | UCCUCCUGCCAAGGCCCGG |
| siRNA 954 | 954 | CGGGCCUUGGCAGGAGGAU | 3978 | AUCCUCCUGCCAAGGCCCG |
| siRNA 955 | 955 | GGGCCUUGGCAGGAGGAUG | 3979 | CAUCCUCCUGCCAAGGCCC |
| siRNA 956 | 956 | GGCCUUGGCAGGAGGAUGU | 3980 | ACAUCCUCCUGCCAAGGCC |
| siRNA 957 | 957 | GCCUUGGCAGGAGGAUGUG | 3981 | CACAUCCUCCUGCCAAGGC |
| siRNA 958 | 958 | CCUUGGCAGGAGGAUGUGG | 3982 | CCACAUCCUCCUGCCAAGG |
| siRNA 959 | 959 | CUUGGCAGGAGGAUGUGGC | 3983 | GCCACAUCCUCCUGCCAAG |
| siRNA 960 | 960 | UUGGCAGGAGGAUGUGGCA | 3984 | UGCCACAUCCUCCUGCCAA |
| siRNA 961 | 961 | UGGCAGGAGGAUGUGGCAG | 3985 | CUGCCACAUCCUCCUGCCA |
| siRNA 962 | 962 | GGCAGGAGGAUGUGGCAGA | 3986 | UCUGCCACAUCCUCCUGCC |
| siRNA 963 | 963 | GCAGGAGGAUGUGGCAGAU | 3987 | AUCUGCCACAUCCUCCUGC |
| siRNA 964 | 964 | CAGGAGGAUGUGGCAGAUG | 3988 | CAUCUGCCACAUCCUCCUG |
| siRNA 965 | 965 | AGGAGGAUGUGGCAGAUGC | 3989 | GCAUCUGCCACAUCCUCCU |
| siRNA 966 | 966 | GGAGGAUGUGGCAGAUGCU | 3990 | AGCAUCUGCCACAUCCUCC |
| siRNA 967 | 967 | GAGGAUGUGGCAGAUGCUG | 3991 | CAGCAUCUGCCACAUCCUC |
| siRNA 968 | 968 | AGGAUGUGGCAGAUGCUGA | 3992 | UCAGCAUCUGCCACAUCCU |
| siRNA 969 | 969 | GGAUGUGGCAGAUGCUGAA | 3993 | UUCAGCAUCUGCCACAUCC |
| siRNA 970 | 970 | GAUGUGGCAGAUGCUGAAG | 3994 | CUUCAGCAUCUGCCACAUC |
| siRNA 971 | 971 | AUGUGGCAGAUGCUGAAGA | 3995 | UCUUCAGCAUCUGCCACAU |
| siRNA 972 | 972 | UGUGGCAGAUGCUGAAGAG | 3996 | CUCUUCAGCAUCUGCCACA |
| siRNA 973 | 973 | GUGGCAGAUGCUGAAGAGU | 3997 | ACUCUUCAGCAUCUGCCAC |
| siRNA 974 | 974 | UGGCAGAUGCUGAAGAGUG | 3998 | CACUCUUCAGCAUCUGCCA |
| siRNA 975 | 975 | GGCAGAUGCUGAAGAGUGU | 3999 | ACACUCUUCAGCAUCUGCC |
| siRNA 976 | 976 | GCAGAUGCUGAAGAGUGUG | 4000 | CACACUCUUCAGCAUCUGC |
| siRNA 977 | 977 | CAGAUGCUGAAGAGUGUGC | 4001 | GCACACUCUUCAGCAUCUG |
| siRNA 978 | 978 | AGAUGCUGAAGAGUGUGCU | 4002 | AGCACACUCUUCAGCAUCU |
| siRNA 979 | 979 | GAUGCUGAAGAGUGUGCUG | 4003 | CAGCACACUCUUCAGCAUC |
| siRNA 980 | 980 | AUGCUGAAGAGUGUGCUGG | 4004 | CCAGCACACUCUUCAGCAU |
| siRNA 981 | 981 | UGCUGAAGAGUGUGCUGGU | 4005 | ACCAGCACACUCUUCAGCA |
| siRNA 982 | 982 | GCUGAAGAGUGUGCUGGUC | 4006 | GACCAGCACACUCUUCAGC |
| siRNA 983 | 983 | CUGAAGAGUGUGCUGGUCG | 4007 | CGACCAGCACACUCUUCAG |
| siRNA 984 | 984 | UGAAGAGUGUGCUGGUCGC | 4008 | GCGACCAGCACACUCUUCA |
| siRNA 985 | 985 | GAAGAGUGUGCUGGUCGCU | 4009 | AGCGACCAGCACACUCUUC |
| siRNA 986 | 986 | AAGAGUGUGCUGGUCGCUG | 4010 | CAGCGACCAGCACACUCUU |
| siRNA 987 | 987 | AGAGUGUGCUGGUCGCUGU | 4011 | ACAGCGACCAGCACACUCU |
| siRNA 988 | 988 | GAGUGUGCUGGUCGCUGUG | 4012 | CACAGCGACCAGCACACUC |
| siRNA 989 | 989 | AGUGUGCUGGUCGCUGUGG | 4013 | CCACAGCGACCAGCACACU |
| siRNA 990 | 990 | GUGUGCUGGUCGCUGUGGG | 4014 | CCCACAGCGACCAGCACAC |
| siRNA 991 | 991 | UGUGCUGGUCGCUGUGGGC | 4015 | GCCCACAGCGACCAGCACA |
| siRNA 992 | 992 | GUGCUGGUCGCUGUGGGCC | 4016 | GGCCCACAGCGACCAGCAC |
| siRNA 993 | 993 | UGCUGGUCGCUGUGGGCCC | 4017 | GGGCCCACAGCGACCAGCA |
| siRNA 994 | 994 | GCUGGUCGCUGUGGGCCCU | 4018 | AGGGCCCACAGCGACCAGC |
| siRNA 995 | 995 | CUGGUCGCUGUGGGCCCUU | 4019 | AAGGGCCCACAGCGACCAG |
| siRNA 996 | 996 | UGGUCGCUGUGGGCCCUUA | 4020 | UAAGGGCCCACAGCGACCA |
| siRNA 997 | 997 | GGUCGCUGUGGGCCCUUAA | 4021 | UUAAGGGCCCACAGCGACC |
| siRNA 998 | 998 | GUCGCUGUGGGCCCUUAAU | 4022 | AUUAAGGGCCCACAGCGAC |
| siRNA 999 | 999 | UCGCUGUGGGCCCUUAAUG | 4023 | CAUUAAGGGCCCACAGCGA |
| siRNA 1000 | 1000 | CGCUGUGGGCCCUUAAUGG | 4024 | CCAUUAAGGGCCCACAGCG |
| siRNA 1001 | 1001 | GCUGUGGGCCCUUAAUGGA | 4025 | UCCAUUAAGGGCCCACAGC |
| siRNA 1002 | 1002 | CUGUGGGCCCUUAAUGGAC | 4026 | GUCCAUUAAGGGCCCACAG |
| siRNA 1003 | 1003 | UGUGGGCCCUUAAUGGACU | 4027 | AGUCCAUUAAGGGCCCACA |
| siRNA 1004 | 1004 | GUGGGCCCUUAAUGGACUG | 4028 | CAGUCCAUUAAGGGCCCAC |
| siRNA 1005 | 1005 | UGGGCCCUUAAUGGACUGC | 4029 | GCAGUCCAUUAAGGGCCCA |
| siRNA 1006 | 1006 | GGGCCCUUAAUGGACUGCC | 4030 | GGCAGUCCAUUAAGGGCCC |
| siRNA 1007 | 1007 | GGCCCUUAAUGGACUGCCG | 4031 | CGGCAGUCCAUUAAGGGCC |
| siRNA 1008 | 1008 | GCCCUUAAUGGACUGCCGG | 4032 | CCGGCAGUCCAUUAAGGGC |
| siRNA 1009 | 1009 | CCCUUAAUGGACUGCCGGG | 4033 | CCCGGCAGUCCAUUAAGGG |
| siRNA 1010 | 1010 | CCUUAAUGGACUGCCGGGC | 4034 | GCCCGGCAGUCCAUUAAGG |
| siRNA 1011 | 1011 | CUUAAUGGACUGCCGGGCC | 4035 | GGCCCGGCAGUCCAUUAAG |
| siRNA 1012 | 1012 | UUAAUGGACUGCCGGGCCU | 4036 | AGGCCCGGCAGUCCAUUAA |
| siRNA 1013 | 1013 | UAAUGGACUGCCGGGCCUU | 4037 | AAGGCCCGGCAGUCCAUUA |
| siRNA 1014 | 1014 | AAUGGACUGCCGGGCCUUC | 4038 | GAAGGCCCGGCAGUCCAUU |
| siRNA 1015 | 1015 | AUGGACUGCCGGGCCUUCC | 4039 | GGAAGGCCCGGCAGUCCAU |
| siRNA 1016 | 1016 | UGGACUGCCGGGCCUUCCA | 4040 | UGGAAGGCCCGGCAGUCCA |
| siRNA 1017 | 1017 | GGACUGCCGGGCCUUCCAC | 4041 | GUGGAAGGCCCGGCAGUCC |
| siRNA 1018 | 1018 | GACUGCCGGGCCUUCCACU | 4042 | AGUGGAAGGCCCGGCAGUC |
| siRNA 1019 | 1019 | ACUGCCGGGCCUUCCACUA | 4043 | UAGUGGAAGGCCCGGCAGU |
| siRNA 1020 | 1020 | CUGCCGGGCCUUCCACUAC | 4044 | GUAGUGGAAGGCCCGGCAG |
| siRNA 1021 | 1021 | UGCCGGGCCUUCCACUACA | 4045 | UGUAGUGGAAGGCCCGGCA |
| siRNA 1022 | 1022 | GCCGGGCCUUCCACUACAA | 4046 | UUGUAGUGGAAGGCCCGGC |
| siRNA 1023 | 1023 | CCGGGCCUUCCACUACAAC | 4047 | GUUGUAGUGGAAGGCCCGG |
| siRNA 1024 | 1024 | CGGGCCUUCCACUACAACG | 4048 | CGUUGUAGUGGAAGGCCCG |
| siRNA 1025 | 1025 | GGGCCUUCCACUACAACGU | 4049 | ACGUUGUAGUGGAAGGCCC |
| siRNA 1026 | 1026 | GGCCUUCCACUACAACGUG | 4050 | CACGUUGUAGUGGAAGGCC |
| siRNA 1027 | 1027 | GCCUUCCACUACAACGUGA | 4051 | UCACGUUGUAGUGGAAGGC |
| siRNA 1028 | 1028 | CCUUCCACUACAACGUGAG | 4052 | CUCACGUUGUAGUGGAAGG |
| siRNA 1029 | 1029 | CUUCCACUACAACGUGAGC | 4053 | GCUCACGUUGUAGUGGAAG |
| siRNA 1030 | 1030 | UUCCACUACAACGUGAGCA | 4054 | UGCUCACGUUGUAGUGGAA |
| siRNA 1031 | 1031 | UCCACUACAACGUGAGCAG | 4055 | CUGCUCACGUUGUAGUGGA |
| siRNA 1032 | 1032 | CCACUACAACGUGAGCAGC | 4056 | GCUGCUCACGUUGUAGUGG |
| siRNA 1033 | 1033 | CACUACAACGUGAGCAGCC | 4057 | GGCUGCUCACGUUGUAGUG |
| siRNA 1034 | 1034 | ACUACAACGUGAGCAGCCA | 4058 | UGGCUGCUCACGUUGUAGU |
| siRNA 1035 | 1035 | CUACAACGUGAGCAGCCAU | 4059 | AUGGCUGCUCACGUUGUAG |
| siRNA 1036 | 1036 | UACAACGUGAGCAGCCAUG | 4060 | CAUGGCUGCUCACGUUGUA |
| siRNA 1037 | 1037 | ACAACGUGAGCAGCCAUGG | 4061 | CCAUGGCUGCUCACGUUGU |
| siRNA 1038 | 1038 | CAACGUGAGCAGCCAUGGU | 4062 | ACCAUGGCUGCUCACGUUG |
| siRNA 1039 | 1039 | AACGUGAGCAGCCAUGGUU | 4063 | AACCAUGGCUGCUCACGUU |
| siRNA 1040 | 1040 | ACGUGAGCAGCCAUGGUUG | 4064 | CAACCAUGGCUGCUCACGU |
| siRNA 1041 | 1041 | CGUGAGCAGCCAUGGUUGC | 4065 | GCAACCAUGGCUGCUCACG |
| siRNA 1042 | 1042 | GUGAGCAGCCAUGGUUGCC | 4066 | GGCAACCAUGGCUGCUCAC |
| siRNA 1043 | 1043 | UGAGCAGCCAUGGUUGCCA | 4067 | UGGCAACCAUGGCUGCUCA |
| siRNA 1044 | 1044 | GAGCAGCCAUGGUUGCCAA | 4068 | UUGGCAACCAUGGCUGCUC |
| siRNA 1045 | 1045 | AGCAGCCAUGGUUGCCAAC | 4069 | GUUGGCAACCAUGGCUGCU |
| siRNA 1046 | 1046 | GCAGCCAUGGUUGCCAACU | 4070 | AGUUGGCAACCAUGGCUGC |
| siRNA 1047 | 1047 | CAGCCAUGGUUGCCAACUG | 4071 | CAGUUGGCAACCAUGGCUG |
| siRNA 1048 | 1048 | AGCCAUGGUUGCCAACUGC | 4072 | GCAGUUGGCAACCAUGGCU |
| siRNA 1049 | 1049 | GCCAUGGUUGCCAACUGCU | 4073 | AGCAGUUGGCAACCAUGGC |
| siRNA 1050 | 1050 | CCAUGGUUGCCAACUGCUG | 4074 | CAGCAGUUGGCAACCAUGG |
| siRNA 1051 | 1051 | CAUGGUUGCCAACUGCUGC | 4075 | GCAGCAGUUGGCAACCAUG |
| siRNA 1052 | 1052 | AUGGUUGCCAACUGCUGCC | 4076 | GGCAGCAGUUGGCAACCAU |
| siRNA 1053 | 1053 | UGGUUGCCAACUGCUGCCA | 4077 | UGGCAGCAGUUGGCAACCA |
| siRNA 1054 | 1054 | GGUUGCCAACUGCUGCCAU | 4078 | AUGGCAGCAGUUGGCAACC |
| siRNA 1055 | 1055 | GUUGCCAACUGCUGCCAUG | 4079 | CAUGGCAGCAGUUGGCAAC |
| siRNA 1056 | 1056 | UUGCCAACUGCUGCCAUGG | 4080 | CCAUGGCAGCAGUUGGCAA |
| siRNA 1057 | 1057 | UGCCAACUGCUGCCAUGGA | 4081 | UCCAUGGCAGCAGUUGGCA |
| siRNA 1058 | 1058 | GCCAACUGCUGCCAUGGAC | 4082 | GUCCAUGGCAGCAGUUGGC |
| siRNA 1059 | 1059 | CCAACUGCUGCCAUGGACU | 4083 | AGUCCAUGGCAGCAGUUGG |
| siRNA 1060 | 1060 | CAACUGCUGCCAUGGACUC | 4084 | GAGUCCAUGGCAGCAGUUG |
| siRNA 1061 | 1061 | AACUGCUGCCAUGGACUCA | 4085 | UGAGUCCAUGGCAGCAGUU |
| siRNA 1062 | 1062 | ACUGCUGCCAUGGACUCAA | 4086 | UUGAGUCCAUGGCAGCAGU |
| siRNA 1063 | 1063 | CUGCUGCCAUGGACUCAAC | 4087 | GUUGAGUCCAUGGCAGCAG |
| siRNA 1064 | 1064 | UGCUGCCAUGGACUCAACA | 4088 | UGUUGAGUCCAUGGCAGCA |
| siRNA 1065 | 1065 | GCUGCCAUGGACUCAACAC | 4089 | GUGUUGAGUCCAUGGCAGC |
| siRNA 1066 | 1066 | CUGCCAUGGACUCAACACU | 4090 | AGUGUUGAGUCCAUGGCAG |
| siRNA 1067 | 1067 | UGCCAUGGACUCAACACUC | 4091 | GAGUGUUGAGUCCAUGGCA |
| siRNA 1068 | 1068 | GCCAUGGACUCAACACUCG | 4092 | CGAGUGUUGAGUCCAUGGC |
| siRNA 1069 | 1069 | CCAUGGACUCAACACUCGC | 4093 | GCGAGUGUUGAGUCCAUGG |
| siRNA 1070 | 1070 | CAUGGACUCAACACUCGCC | 4094 | GGCGAGUGUUGAGUCCAUG |
| siRNA 1071 | 1071 | AUGGACUCAACACUCGCCC | 4095 | GGGCGAGUGUUGAGUCCAU |
| siRNA 1072 | 1072 | UGGACUCAACACUCGCCCC | 4096 | GGGGCGAGUGUUGAGUCCA |
| siRNA 1073 | 1073 | GGACUCAACACUCGCCCCA | 4097 | UGGGGCGAGUGUUGAGUCC |
| siRNA 1074 | 1074 | GACUCAACACUCGCCCCAC | 4098 | GUGGGGCGAGUGUUGAGUC |
| siRNA 1075 | 1075 | ACUCAACACUCGCCCCACA | 4099 | UGUGGGGCGAGUGUUGAGU |
| siRNA 1076 | 1076 | CUCAACACUCGCCCCACAC | 4100 | GUGUGGGGCGAGUGUUGAG |
| siRNA 1077 | 1077 | UCAACACUCGCCCCACACG | 4101 | CGUGUGGGGCGAGUGUUGA |
| siRNA 1078 | 1078 | CAACACUCGCCCCACACGA | 4102 | UCGUGUGGGGCGAGUGUUG |
| siRNA 1079 | 1079 | AACACUCGCCCCACACGAG | 4103 | CUCGUGUGGGGCGAGUGUU |
| siRNA 1080 | 1080 | ACACUCGCCCCACACGAGG | 4104 | CCUCGUGUGGGGCGAGUGU |
| siRNA 1081 | 1081 | CACUCGCCCCACACGAGGC | 4105 | GCCUCGUGUGGGGCGAGUG |
| siRNA 1082 | 1082 | ACUCGCCCCACACGAGGCU | 4106 | AGCCUCGUGUGGGGCGAGU |
| siRNA 1083 | 1083 | CUCGCCCCACACGAGGCUG | 4107 | CAGCCUCGUGUGGGGCGAG |
| siRNA 1084 | 1084 | UCGCCCCACACGAGGCUGC | 4108 | GCAGCCUCGUGUGGGGCGA |
| siRNA 1085 | 1085 | CGCCCCACACGAGGCUGCG | 4109 | CGCAGCCUCGUGUGGGGCG |
| siRNA 1086 | 1086 | GCCCCACACGAGGCUGCGG | 4110 | CCGCAGCCUCGUGUGGGGC |
| siRNA 1087 | 1087 | CCCCACACGAGGCUGCGGC | 4111 | GCCGCAGCCUCGUGUGGGG |
| siRNA 1088 | 1088 | CCCACACGAGGCUGCGGCG | 4112 | CGCCGCAGCCUCGUGUGGG |
| siRNA 1089 | 1089 | CCACACGAGGCUGCGGCGU | 4113 | ACGCCGCAGCCUCGUGUGG |
| siRNA 1090 | 1090 | CACACGAGGCUGCGGCGUU | 4114 | AACGCCGCAGCCUCGUGUG |
| siRNA 1091 | 1091 | ACACGAGGCUGCGGCGUUC | 4115 | GAACGCCGCAGCCUCGUGU |
| siRNA 1092 | 1092 | CACGAGGCUGCGGCGUUCU | 4116 | AGAACGCCGCAGCCUCGUG |
| siRNA 1093 | 1093 | ACGAGGCUGCGGCGUUCUG | 4117 | CAGAACGCCGCAGCCUCGU |
| siRNA 1094 | 1094 | CGAGGCUGCGGCGUUCUGG | 4118 | CCAGAACGCCGCAGCCUCG |
| siRNA 1095 | 1095 | GAGGCUGCGGCGUUCUGGG | 4119 | CCCAGAACGCCGCAGCCUC |
| siRNA 1096 | 1096 | AGGCUGCGGCGUUCUGGGC | 4120 | GCCCAGAACGCCGCAGCCU |
| SiRNA 1097 | 1097 | GGCUGCGGCGUUCUGGGCG | 4121 | CGCCCAGAACGCCGCAGCC |
| siRNA 1098 | 1098 | GCUGCGGCGUUCUGGGCGC | 4122 | GCGCCCAGAACGCCGCAGC |
| siRNA 1099 | 1099 | CUGCGGCGUUCUGGGCGCU | 4123 | AGCGCCCAGAACGCCGCAG |
| siRNA 1100 | 1100 | UGCGGCGUUCUGGGCGCUG | 4124 | CAGCGCCCAGAACGCCGCA |
| siRNA 1101 | 1101 | GCGGCGUUCUGGGCGCUGU | 4125 | ACAGCGCCCAGAACGCCGC |
| siRNA 1102 | 1102 | CGGCGUUCUGGGCGCUGUG | 4126 | CACAGCGCCCAGAACGCCG |
| siRNA 1103 | 1103 | GGCGUUCUGGGCGCUGUGA | 4127 | UCACAGCGCCCAGAACGCC |
| siRNA 1104 | 1104 | GCGUUCUGGGCGCUGUGAC | 4128 | GUCACAGCGCCCAGAACGC |
| siRNA 1105 | 1105 | CGUUCUGGGCGCUGUGACC | 4129 | GGUCACAGCGCCCAGAACG |
| siRNA 1106 | 1106 | GUUCUGGGCGCUGUGACCU | 4130 | AGGUCACAGCGCCCAGAAC |
| siRNA 1107 | 1107 | UUCUGGGCGCUGUGACCUC | 4131 | GAGGUCACAGCGCCCAGAA |
| siRNA 1108 | 1108 | UCUGGGCGCUGUGACCUCU | 4132 | AGAGGUCACAGCGCCCAGA |
| siRNA 1109 | 1109 | CUGGGCGCUGUGACCUCUU | 4133 | AAGAGGUCACAGCGCCCAG |
| siRNA 1110 | 1110 | UGGGCGCUGUGACCUCUUC | 4134 | GAAGAGGUCACAGCGCCCA |
| siRNA 1111 | 1111 | GGGCGCUGUGACCUCUUCC | 4135 | GGAAGAGGUCACAGCGCCC |
| siRNA 1112 | 1112 | GGCGCUGUGACCUCUUCCA | 4136 | UGGAAGAGGUCACAGCGCC |
| siRNA 1113 | 1113 | GCGCUGUGACCUCUUCCAG | 4137 | CUGGAAGAGGUCACAGCGC |
| siRNA 1114 | 1114 | CGCUGUGACCUCUUCCAGA | 4138 | UCUGGAAGAGGUCACAGCG |
| siRNA 1115 | 1115 | GCUGUGACCUCUUCCAGAA | 4139 | UUCUGGAAGAGGUCACAGC |
| siRNA 1116 | 1116 | CUGUGACCUCUUCCAGAAG | 4140 | CUUCUGGAAGAGGUCACAG |
| siRNA 1117 | 1117 | UGUGACCUCUUCCAGAAGA | 4141 | UCUUCUGGAAGAGGUCACA |
| siRNA 1118 | 1118 | GUGACCUCUUCCAGAAGAA | 4142 | UUCUUCUGGAAGAGGUCAC |
| siRNA 1119 | 1119 | UGACCUCUUCCAGAAGAAA | 4143 | UUUCUUCUGGAAGAGGUCA |
| siRNA 1120 | 1120 | GACCUCUUCCAGAAGAAAG | 4144 | CUUUCUUCUGGAAGAGGUC |
| siRNA 1121 | 1121 | ACCUCUUCCAGAAGAAAGA | 4145 | UCUUUCUUCUGGAAGAGGU |
| siRNA 1122 | 1122 | CCUCUUCCAGAAGAAAGAC | 4146 | GUCUUUCUUCUGGAAGAGG |
| siRNA 1123 | 1123 | CUCUUCCAGAAGAAAGACU | 4147 | AGUCUUUCUUCUGGAAGAG |
| siRNA 1124 | 1124 | UCUUCCAGAAGAAAGACUA | 4148 | UAGUCUUUCUUCUGGAAGA |
| siRNA 1125 | 1125 | CUUCCAGAAGAAAGACUAC | 4149 | GUAGUCUUUCUUCUGGAAG |
| siRNA 1126 | 1126 | UUCCAGAAGAAAGACUACG | 4150 | CGUAGUCUUUCUUCUGGAA |
| siRNA 1127 | 1127 | UCCAGAAGAAAGACUACGU | 4151 | ACGUAGUCUUUCUUCUGGA |
| siRNA 1128 | 1128 | CCAGAAGAAAGACUACGUA | 4152 | UACGUAGUCUUUCUUCUGG |
| siRNA 1129 | 1129 | CAGAAGAAAGACUACGUAC | 4153 | GUACGUAGUCUUUCUUCUG |
| siRNA 1130 | 1130 | AGAAGAAAGACUACGUACG | 4154 | CGUACGUAGUCUUUCUUCU |
| siRNA 1131 | 1131 | GAAGAAAGACUACGUACGG | 4155 | CCGUACGUAGUCUUUCUUC |
| siRNA 1132 | 1132 | AAGAAAGACUACGUACGGA | 4156 | UCCGUACGUAGUCUUUCUU |
| siRNA 1133 | 1133 | AGAAAGACUACGUACGGAC | 4157 | GUCCGUACGUAGUCUUUCU |
| siRNA 1134 | 1134 | GAAAGACUACGUACGGACC | 4158 | GGUCCGUACGUAGUCUUUC |
| siRNA 1135 | 1135 | AAAGACUACGUACGGACCU | 4159 | AGGUCCGUACGUAGUCUUU |
| siRNA 1136 | 1136 | AAGACUACGUACGGACCUG | 4160 | CAGGUCCGUACGUAGUCUU |
| siRNA 1137 | 1137 | AGACUACGUACGGACCUGC | 4161 | GCAGGUCCGUACGUAGUCU |
| siRNA 1138 | 1138 | GACUACGUACGGACCUGCA | 4162 | UGCAGGUCCGUACGUAGUC |
| siRNA 1139 | 1139 | ACUACGUACGGACCUGCAU | 4163 | AUGCAGGUCCGUACGUAGU |
| siRNA 1140 | 1140 | CUACGUACGGACCUGCAUC | 4164 | GAUGCAGGUCCGUACGUAG |
| siRNA 1141 | 1141 | UACGUACGGACCUGCAUCA | 4165 | UGAUGCAGGUCCGUACGUA |
| siRNA 1142 | 1142 | ACGUACGGACCUGCAUCAU | 4166 | AUGAUGCAGGUCCGUACGU |
| siRNA 1143 | 1143 | CGUACGGACCUGCAUCAUG | 4167 | CAUGAUGCAGGUCCGUACG |
| siRNA 1144 | 1144 | GUACGGACCUGCAUCAUGA | 4168 | UCAUGAUGCAGGUCCGUAC |
| siRNA 1145 | 1145 | UACGGACCUGCAUCAUGAA | 4169 | UUCAUGAUGCAGGUCCGUA |
| siRNA 1146 | 1146 | ACGGACCUGCAUCAUGAAC | 4170 | GUUCAUGAUGCAGGUCCGU |
| siRNA 1147 | 1147 | CGGACCUGCAUCAUGAACA | 4171 | UGUUCAUGAUGCAGGUCCG |
| siRNA 1148 | 1148 | GGACCUGCAUCAUGAACAA | 4172 | UUGUUCAUGAUGCAGGUCC |
| siRNA 1149 | 1149 | GACCUGCAUCAUGAACAAU | 4173 | AUUGUUCAUGAUGCAGGUC |
| siRNA 1150 | 1150 | ACCUGCAUCAUGAACAAUG | 4174 | CAUUGUUCAUGAUGCAGGU |
| siRNA 1151 | 1151 | CCUGCAUCAUGAACAAUGG | 4175 | CCAUUGUUCAUGAUGCAGG |
| siRNA 1152 | 1152 | CUGCAUCAUGAACAAUGGG | 4176 | CCCAUUGUUCAUGAUGCAG |
| siRNA 1153 | 1153 | UGCAUCAUGAACAAUGGGG | 4177 | CCCCAUUGUUCAUGAUGCA |
| siRNA 1154 | 1154 | GCAUCAUGAACAAUGGGGU | 4178 | ACCCCAUUGUUCAUGAUGC |
| siRNA 1155 | 1155 | CAUCAUGAACAAUGGGGUU | 4179 | AACCCCAUUGUUCAUGAUG |
| siRNA 1156 | 1156 | AUCAUGAACAAUGGGGUUG | 4180 | CAACCCCAUUGUUCAUGAU |
| siRNA 1157 | 1157 | UCAUGAACAAUGGGGUUGG | 4181 | CCAACCCCAUUGUUCAUGA |
| siRNA 1158 | 1158 | CAUGAACAAUGGGGUUGGG | 4182 | CCCAACCCCAUUGUUCAUG |
| siRNA 1159 | 1159 | AUGAACAAUGGGGUUGGGU | 4183 | ACCCAACCCCAUUGUUCAU |
| siRNA 1160 | 1160 | UGAACAAUGGGGUUGGGUA | 4184 | UACCCAACCCCAUUGUUCA |
| siRNA 1161 | 1161 | GAACAAUGGGGUUGGGUAC | 4185 | GUACCCAACCCCAUUGUUC |
| siRNA 1162 | 1162 | AACAAUGGGGUUGGGUACC | 4186 | GGUACCCAACCCCAUUGUU |
| siRNA 1163 | 1163 | ACAAUGGGGUUGGGUACCG | 4187 | CGGUACCCAACCCCAUUGU |
| siRNA 1164 | 1164 | CAAUGGGGUUGGGUACCGG | 4188 | CCGGUACCCAACCCCAUUG |
| siRNA 1165 | 1165 | AAUGGGGUUGGGUACCGGG | 4189 | CCCGGUACCCAACCCCAUU |
| siRNA 1166 | 1166 | AUGGGGUUGGGUACCGGGG | 4190 | CCCCGGUACCCAACCCCAU |
| siRNA 1167 | 1167 | UGGGGUUGGGUACCGGGGC | 4191 | GCCCCGGUACCCAACCCCA |
| siRNA 1168 | 1168 | GGGGUUGGGUACCGGGGCA | 4192 | UGCCCCGGUACCCAACCCC |
| siRNA 1169 | 1169 | GGGUUGGGUACCGGGGCAC | 4193 | GUGCCCCGGUACCCAACCC |
| siRNA 1170 | 1170 | GGUUGGGUACCGGGGCACC | 4194 | GGUGCCCCGGUACCCAACC |
| siRNA 1171 | 1171 | GUUGGGUACCGGGGCACCA | 4195 | UGGUGCCCCGGUACCCAAC |
| siRNA 1172 | 1172 | UUGGGUACCGGGGCACCAU | 4196 | AUGGUGCCCCGGUACCCAA |
| siRNA 1173 | 1173 | UGGGUACCGGGGCACCAUG | 4197 | CAUGGUGCCCCGGUACCCA |
| siRNA 1174 | 1174 | GGGUACCGGGGCACCAUGG | 4198 | CCAUGGUGCCCCGGUACCC |
| siRNA 1175 | 1175 | GGUACCGGGGCACCAUGGC | 4199 | GCCAUGGUGCCCCGGUACC |
| siRNA 1176 | 1176 | GUACCGGGGCACCAUGGCC | 4200 | GGCCAUGGUGCCCCGGUAC |
| siRNA 1177 | 1177 | UACCGGGGCACCAUGGCCA | 4201 | UGGCCAUGGUGCCCCGGUA |
| siRNA 1178 | 1178 | ACCGGGGCACCAUGGCCAC | 4202 | GUGGCCAUGGUGCCCCGGU |
| siRNA 1179 | 1179 | CCGGGGCACCAUGGCCACG | 4203 | CGUGGCCAUGGUGCCCCGG |
| siRNA 1180 | 1180 | CGGGGCACCAUGGCCACGA | 4204 | UCGUGGCCAUGGUGCCCCG |
| siRNA 1181 | 1181 | GGGGCACCAUGGCCACGAC | 4205 | GUCGUGGCCAUGGUGCCCC |
| siRNA 1182 | 1182 | GGGCACCAUGGCCACGACC | 4206 | GGUCGUGGCCAUGGUGCCC |
| siRNA 1183 | 1183 | GGCACCAUGGCCACGACCG | 4207 | CGGUCGUGGCCAUGGUGCC |
| siRNA 1184 | 1184 | GCACCAUGGCCACGACCGU | 4208 | ACGGUCGUGGCCAUGGUGC |
| siRNA 1185 | 1185 | CACCAUGGCCACGACCGUG | 4209 | CACGGUCGUGGCCAUGGUG |
| siRNA 1186 | 1186 | ACCAUGGCCACGACCGUGG | 4210 | CCACGGUCGUGGCCAUGGU |
| siRNA 1187 | 1187 | CCAUGGCCACGACCGUGGG | 4211 | CCCACGGUCGUGGCCAUGG |
| siRNA 1188 | 1188 | CAUGGCCACGACCGUGGGU | 4212 | ACCCACGGUCGUGGCCAUG |
| siRNA 1189 | 1189 | AUGGCCACGACCGUGGGUG | 4213 | CACCCACGGUCGUGGCCAU |
| siRNA 1190 | 1190 | UGGCCACGACCGUGGGUGG | 4214 | CCACCCACGGUCGUGGCCA |
| siRNA 1191 | 1191 | GGCCACGACCGUGGGUGGC | 4215 | GCCACCCACGGUCGUGGCC |
| siRNA 1192 | 1192 | GCCACGACCGUGGGUGGCC | 4216 | GGCCACCCACGGUCGUGGC |
| siRNA 1193 | 1193 | CCACGACCGUGGGUGGCCU | 4217 | AGGCCACCCACGGUCGUGG |
| siRNA 1194 | 1194 | CACGACCGUGGGUGGCCUG | 4218 | CAGGCCACCCACGGUCGUG |
| siRNA 1195 | 1195 | ACGACCGUGGGUGGCCUGC | 4219 | GCAGGCCACCCACGGUCGU |
| siRNA 1196 | 1196 | CGACCGUGGGUGGCCUGCC | 4220 | GGCAGGCCACCCACGGUCG |
| siRNA 1197 | 1197 | GACCGUGGGUGGCCUGCCC | 4221 | GGGCAGGCCACCCACGGUC |
| siRNA 1198 | 1198 | ACCGUGGGUGGCCUGCCCU | 4222 | AGGGCAGGCCACCCACGGU |
| siRNA 1199 | 1199 | CCGUGGGUGGCCUGCCCUG | 4223 | CAGGGCAGGCCACCCACGG |
| siRNA 1200 | 1200 | CGUGGGUGGCCUGCCCUGC | 4224 | GCAGGGCAGGCCACCCACG |
| siRNA 1201 | 1201 | GUGGGUGGCCUGCCCUGCC | 4225 | GGCAGGGCAGGCCACCCAC |
| siRNA 1202 | 1202 | UGGGUGGCCUGCCCUGCCA | 4226 | UGGCAGGGCAGGCCACCCA |
| siRNA 1203 | 1203 | GGGUGGCCUGCCCUGCCAG | 4227 | CUGGCAGGGCAGGCCACCC |
| siRNA 1204 | 1204 | GGUGGCCUGCCCUGCCAGG | 4228 | CCUGGCAGGGCAGGCCACC |
| siRNA 1205 | 1205 | GUGGCCUGCCCUGCCAGGC | 4229 | GCCUGGCAGGGCAGGCCAC |
| siRNA 1206 | 1206 | UGGCCUGCCCUGCCAGGCU | 4230 | AGCCUGGCAGGGCAGGCCA |
| siRNA 1207 | 1207 | GGCCUGCCCUGCCAGGCUU | 4231 | AAGCCUGGCAGGGCAGGCC |
| siRNA 1208 | 1208 | GCCUGCCCUGCCAGGCUUG | 4232 | CAAGCCUGGCAGGGCAGGC |
| siRNA 1209 | 1209 | CCUGCCCUGCCAGGCUUGG | 4233 | CCAAGCCUGGCAGGGCAGG |
| siRNA 1210 | 1210 | CUGCCCUGCCAGGCUUGGA | 4234 | UCCAAGCCUGGCAGGGCAG |
| siRNA 1211 | 1211 | UGCCCUGCCAGGCUUGGAG | 4235 | CUCCAAGCCUGGCAGGGCA |
| siRNA 1212 | 1212 | GCCCUGCCAGGCUUGGAGC | 4236 | GCUCCAAGCCUGGCAGGGC |
| siRNA 1213 | 1213 | CCCUGCCAGGCUUGGAGCC | 4237 | GGCUCCAAGCCUGGCAGGG |
| siRNA 1214 | 1214 | CCUGCCAGGCUUGGAGCCA | 4238 | UGGCUCCAAGCCUGGCAGG |
| siRNA 1215 | 1215 | CUGCCAGGCUUGGAGCCAC | 4239 | GUGGCUCCAAGCCUGGCAG |
| siRNA 1216 | 1216 | UGCCAGGCUUGGAGCCACA | 4240 | UGUGGCUCCAAGCCUGGCA |
| siRNA 1217 | 1217 | GCCAGGCUUGGAGCCACAA | 4241 | UUGUGGCUCCAAGCCUGGC |
| siRNA 1218 | 1218 | CCAGGCUUGGAGCCACAAG | 4242 | CUUGUGGCUCCAAGCCUGG |
| siRNA 1219 | 1219 | CAGGCUUGGAGCCACAAGU | 4243 | ACUUGUGGCUCCAAGCCUG |
| siRNA 1220 | 1220 | AGGCUUGGAGCCACAAGUU | 4244 | AACUUGUGGCUCCAAGCCU |
| siRNA 1221 | 1221 | GGCUUGGAGCCACAAGUUC | 4245 | GAACUUGUGGCUCCAAGCC |
| siRNA 1222 | 1222 | GCUUGGAGCCACAAGUUCC | 4246 | GGAACUUGUGGCUCCAAGC |
| siRNA 1223 | 1223 | CUUGGAGCCACAAGUUCCC | 4247 | GGGAACUUGUGGCUCCAAG |
| siRNA 1224 | 1224 | UUGGAGCCACAAGUUCCCA | 4248 | UGGGAACUUGUGGCUCCAA |
| siRNA 1225 | 1225 | UGGAGCCACAAGUUCCCAA | 4249 | UUGGGAACUUGUGGCUCCA |
| siRNA 1226 | 1226 | GGAGCCACAAGUUCCCAAA | 4250 | UUUGGGAACUUGUGGCUCC |
| siRNA 1227 | 1227 | GAGCCACAAGUUCCCAAAU | 4251 | AUUUGGGAACUUGUGGCUC |
| siRNA 1228 | 1228 | AGCCACAAGUUCCCAAAUG | 4252 | CAUUUGGGAACUUGUGGCU |
| siRNA 1229 | 1229 | GCCACAAGUUCCCAAAUGA | 4253 | UCAUUUGGGAACUUGUGGC |
| siRNA 1230 | 1230 | CCACAAGUUCCCAAAUGAU | 4254 | AUCAUUUGGGAACUUGUGG |
| siRNA 1231 | 1231 | CACAAGUUCCCAAAUGAUC | 4255 | GAUCAUUUGGGAACUUGUG |
| SiRNA 1232 | 1232 | ACAAGUUCCCAAAUGAUCA | 4256 | UGAUCAUUUGGGAACUUGU |
| siRNA 1233 | 1233 | CAAGUUCCCAAAUGAUCAC | 4257 | GUGAUCAUUUGGGAACUUG |
| siRNA 1234 | 1234 | AAGUUCCCAAAUGAUCACA | 4258 | UGUGAUCAUUUGGGAACUU |
| siRNA 1235 | 1235 | AGUUCCCAAAUGAUCACAA | 4259 | UUGUGAUCAUUUGGGAACU |
| siRNA 1236 | 1236 | GUUCCCAAAUGAUCACAAG | 4260 | CUUGUGAUCAUUUGGGAAC |
| siRNA 1237 | 1237 | UUCCCAAAUGAUCACAAGU | 4261 | ACUUGUGAUCAUUUGGGAA |
| siRNA 1238 | 1238 | UCCCAAAUGAUCACAAGUA | 4262 | UACUUGUGAUCAUUUGGGA |
| siRNA 1239 | 1239 | CCCAAAUGAUCACAAGUAC | 4263 | GUACUUGUGAUCAUUUGGG |
| siRNA 1240 | 1240 | CCAAAUGAUCACAAGUACA | 4264 | UGUACUUGUGAUCAUUUGG |
| siRNA 1241 | 1241 | CAAAUGAUCACAAGUACAC | 4265 | GUGUACUUGUGAUCAUUUG |
| siRNA 1242 | 1242 | AAAUGAUCACAAGUACACG | 4266 | CGUGUACUUGUGAUCAUUU |
| siRNA 1243 | 1243 | AAUGAUCACAAGUACACGC | 4267 | GCGUGUACUUGUGAUCAUU |
| siRNA 1244 | 1244 | AUGAUCACAAGUACACGCC | 4268 | GGCGUGUACUUGUGAUCAU |
| siRNA 1245 | 1245 | UGAUCACAAGUACACGCCC | 4269 | GGGCGUGUACUUGUGAUCA |
| siRNA 1246 | 1246 | GAUCACAAGUACACGCCCA | 4270 | UGGGCGUGUACUUGUGAUC |
| siRNA 1247 | 1247 | AUCACAAGUACACGCCCAC | 4271 | GUGGGCGUGUACUUGUGAU |
| siRNA 1248 | 1248 | UCACAAGUACACGCCCACU | 4272 | AGUGGGCGUGUACUUGUGA |
| siRNA 1249 | 1249 | CACAAGUACACGCCCACUC | 4273 | GAGUGGGCGUGUACUUGUG |
| siRNA 1250 | 1250 | ACAAGUACACGCCCACUCU | 4274 | AGAGUGGGCGUGUACUUGU |
| siRNA 1251 | 1251 | CAAGUACACGCCCACUCUC | 4275 | GAGAGUGGGCGUGUACUUG |
| siRNA 1252 | 1252 | AAGUACACGCCCACUCUCC | 4276 | GGAGAGUGGGCGUGUACUU |
| siRNA 1253 | 1253 | AGUACACGCCCACUCUCCG | 4277 | CGGAGAGUGGGCGUGUACU |
| siRNA 1254 | 1254 | GUACACGCCCACUCUCCGG | 4278 | CCGGAGAGUGGGCGUGUAC |
| siRNA 1255 | 1255 | UACACGCCCACUCUCCGGA | 4279 | UCCGGAGAGUGGGCGUGUA |
| siRNA 1256 | 1256 | ACACGCCCACUCUCCGGAA | 4280 | UUCCGGAGAGUGGGCGUGU |
| siRNA 1257 | 1257 | CACGCCCACUCUCCGGAAU | 4281 | AUUCCGGAGAGUGGGCGUG |
| siRNA 1258 | 1258 | ACGCCCACUCUCCGGAAUG | 4282 | CAUUCCGGAGAGUGGGCGU |
| siRNA 1259 | 1259 | CGCCCACUCUCCGGAAUGG | 4283 | CCAUUCCGGAGAGUGGGCG |
| siRNA 1260 | 1260 | GCCCACUCUCCGGAAUGGC | 4284 | GCCAUUCCGGAGAGUGGGC |
| siRNA 1261 | 1261 | CCCACUCUCCGGAAUGGCC | 4285 | GGCCAUUCCGGAGAGUGGG |
| siRNA 1262 | 1262 | CCACUCUCCGGAAUGGCCU | 4286 | AGGCCAUUCCGGAGAGUGG |
| siRNA 1263 | 1263 | CACUCUCCGGAAUGGCCUG | 4287 | CAGGCCAUUCCGGAGAGUG |
| siRNA 1264 | 1264 | ACUCUCCGGAAUGGCCUGG | 4288 | CCAGGCCAUUCCGGAGAGU |
| siRNA 1265 | 1265 | CUCUCCGGAAUGGCCUGGA | 4289 | UCCAGGCCAUUCCGGAGAG |
| siRNA 1266 | 1266 | UCUCCGGAAUGGCCUGGAA | 4290 | UUCCAGGCCAUUCCGGAGA |
| siRNA 1267 | 1267 | CUCCGGAAUGGCCUGGAAG | 4291 | CUUCCAGGCCAUUCCGGAG |
| siRNA 1268 | 1268 | UCCGGAAUGGCCUGGAAGA | 4292 | UCUUCCAGGCCAUUCCGGA |
| siRNA 1269 | 1269 | CCGGAAUGGCCUGGAAGAG | 4293 | CUCUUCCAGGCCAUUCCGG |
| siRNA 1270 | 1270 | CGGAAUGGCCUGGAAGAGA | 4294 | UCUCUUCCAGGCCAUUCCG |
| siRNA 1271 | 1271 | GGAAUGGCCUGGAAGAGAA | 4295 | UUCUCUUCCAGGCCAUUCC |
| siRNA 1272 | 1272 | GAAUGGCCUGGAAGAGAAC | 4296 | GUUCUCUUCCAGGCCAUUC |
| siRNA 1273 | 1273 | AAUGGCCUGGAAGAGAACU | 4297 | AGUUCUCUUCCAGGCCAUU |
| siRNA 1274 | 1274 | AUGGCCUGGAAGAGAACUU | 4298 | AAGUUCUCUUCCAGGCCAU |
| siRNA 1275 | 1275 | UGGCCUGGAAGAGAACUUC | 4299 | GAAGUUCUCUUCCAGGCCA |
| siRNA 1276 | 1276 | GGCCUGGAAGAGAACUUCU | 4300 | AGAAGUUCUCUUCCAGGCC |
| siRNA 1277 | 1277 | GCCUGGAAGAGAACUUCUG | 4301 | CAGAAGUUCUCUUCCAGGC |
| siRNA 1278 | 1278 | CCUGGAAGAGAACUUCUGC | 4302 | GCAGAAGUUCUCUUCCAGG |
| siRNA 1279 | 1279 | CUGGAAGAGAACUUCUGCC | 4303 | GGCAGAAGUUCUCUUCCAG |
| siRNA 1280 | 1280 | UGGAAGAGAACUUCUGCCG | 4304 | CGGCAGAAGUUCUCUUCCA |
| siRNA 1281 | 1281 | GGAAGAGAACUUCUGCCGU | 4305 | ACGGCAGAAGUUCUCUUCC |
| siRNA 1282 | 1282 | GAAGAGAACUUCUGCCGUA | 4306 | UACGGCAGAAGUUCUCUUC |
| siRNA 1283 | 1283 | AAGAGAACUUCUGCCGUAA | 4307 | UUACGGCAGAAGUUCUCUU |
| siRNA 1284 | 1284 | AGAGAACUUCUGCCGUAAC | 4308 | GUUACGGCAGAAGUUCUCU |
| siRNA 1285 | 1285 | GAGAACUUCUGCCGUAACC | 4309 | GGUUACGGCAGAAGUUCUC |
| siRNA 1286 | 1286 | AGAACUUCUGCCGUAACCC | 4310 | GGGUUACGGCAGAAGUUCU |
| siRNA 1287 | 1287 | GAACUUCUGCCGUAACCCU | 4311 | AGGGUUACGGCAGAAGUUC |
| siRNA 1288 | 1288 | AACUUCUGCCGUAACCCUG | 4312 | CAGGGUUACGGCAGAAGUU |
| siRNA 1289 | 1289 | ACUUCUGCCGUAACCCUGA | 4313 | UCAGGGUUACGGCAGAAGU |
| siRNA 1290 | 1290 | CUUCUGCCGUAACCCUGAU | 4314 | AUCAGGGUUACGGCAGAAG |
| siRNA 1291 | 1291 | UUCUGCCGUAACCCUGAUG | 4315 | CAUCAGGGUUACGGCAGAA |
| siRNA 1292 | 1292 | UCUGCCGUAACCCUGAUGG | 4316 | CCAUCAGGGUUACGGCAGA |
| siRNA 1293 | 1293 | CUGCCGUAACCCUGAUGGC | 4317 | GCCAUCAGGGUUACGGCAG |
| siRNA 1294 | 1294 | UGCCGUAACCCUGAUGGCG | 4318 | CGCCAUCAGGGUUACGGCA |
| siRNA 1295 | 1295 | GCCGUAACCCUGAUGGCGA | 4319 | UCGCCAUCAGGGUUACGGC |
| siRNA 1296 | 1296 | CCGUAACCCUGAUGGCGAC | 4320 | GUCGCCAUCAGGGUUACGG |
| siRNA 1297 | 1297 | CGUAACCCUGAUGGCGACC | 4321 | GGUCGCCAUCAGGGUUACG |
| siRNA 1298 | 1298 | GUAACCCUGAUGGCGACCC | 4322 | GGGUCGCCAUCAGGGUUAC |
| siRNA 1299 | 1299 | UAACCCUGAUGGCGACCCC | 4323 | GGGGUCGCCAUCAGGGUUA |
| siRNA 1300 | 1300 | AACCCUGAUGGCGACCCCG | 4324 | CGGGGUCGCCAUCAGGGUU |
| siRNA 1301 | 1301 | ACCCUGAUGGCGACCCCGG | 4325 | CCGGGGUCGCCAUCAGGGU |
| siRNA 1302 | 1302 | CCCUGAUGGCGACCCCGGA | 4326 | UCCGGGGUCGCCAUCAGGG |
| siRNA 1303 | 1303 | CCUGAUGGCGACCCCGGAG | 4327 | CUCCGGGGUCGCCAUCAGG |
| siRNA 1304 | 1304 | CUGAUGGCGACCCCGGAGG | 4328 | CCUCCGGGGUCGCCAUCAG |
| siRNA 1305 | 1305 | UGAUGGCGACCCCGGAGGU | 4329 | ACCUCCGGGGUCGCCAUCA |
| siRNA 1306 | 1306 | GAUGGCGACCCCGGAGGUC | 4330 | GACCUCCGGGGUCGCCAUC |
| siRNA 1307 | 1307 | AUGGCGACCCCGGAGGUCC | 4331 | GGACCUCCGGGGUCGCCAU |
| siRNA 1308 | 1308 | UGGCGACCCCGGAGGUCCU | 4332 | AGGACCUCCGGGGUCGCCA |
| siRNA 1309 | 1309 | GGCGACCCCGGAGGUCCUU | 4333 | AAGGACCUCCGGGGUCGCC |
| siRNA 1310 | 1310 | GCGACCCCGGAGGUCCUUG | 4334 | CAAGGACCUCCGGGGUCGC |
| siRNA 1311 | 1311 | CGACCCCGGAGGUCCUUGG | 4335 | CCAAGGACCUCCGGGGUCG |
| siRNA 1312 | 1312 | GACCCCGGAGGUCCUUGGU | 4336 | ACCAAGGACCUCCGGGGUC |
| siRNA 1313 | 1313 | ACCCCGGAGGUCCUUGGUG | 4337 | CACCAAGGACCUCCGGGGU |
| siRNA 1314 | 1314 | CCCCGGAGGUCCUUGGUGC | 4338 | GCACCAAGGACCUCCGGGG |
| siRNA 1315 | 1315 | CCCGGAGGUCCUUGGUGCU | 4339 | AGCACCAAGGACCUCCGGG |
| siRNA 1316 | 1316 | CCGGAGGUCCUUGGUGCUA | 4340 | UAGCACCAAGGACCUCCGG |
| siRNA 1317 | 1317 | CGGAGGUCCUUGGUGCUAC | 4341 | GUAGCACCAAGGACCUCCG |
| siRNA 1318 | 1318 | GGAGGUCCUUGGUGCUACA | 4342 | UGUAGCACCAAGGACCUCC |
| siRNA 1319 | 1319 | GAGGUCCUUGGUGCUACAC | 4343 | GUGUAGCACCAAGGACCUC |
| siRNA 1320 | 1320 | AGGUCCUUGGUGCUACACA | 4344 | UGUGUAGCACCAAGGACCU |
| siRNA 1321 | 1321 | GGUCCUUGGUGCUACACAA | 4345 | UUGUGUAGCACCAAGGACC |
| siRNA 1322 | 1322 | GUCCUUGGUGCUACACAAC | 4346 | GUUGUGUAGCACCAAGGAC |
| siRNA 1323 | 1323 | UCCUUGGUGCUACACAACA | 4347 | UGUUGUGUAGCACCAAGGA |
| siRNA 1324 | 1324 | CCUUGGUGCUACACAACAG | 4348 | CUGUUGUGUAGCACCAAGG |
| siRNA 1325 | 1325 | CUUGGUGCUACACAACAGA | 4349 | UCUGUUGUGUAGCACCAAG |
| siRNA 1326 | 1326 | UUGGUGCUACACAACAGAC | 4350 | GUCUGUUGUGUAGCACCAA |
| siRNA 1327 | 1327 | UGGUGCUACACAACAGACC | 4351 | GGUCUGUUGUGUAGCACCA |
| siRNA 1328 | 1328 | GGUGCUACACAACAGACCC | 4352 | GGGUCUGUUGUGUAGCACC |
| siRNA 1329 | 1329 | GUGCUACACAACAGACCCU | 4353 | AGGGUCUGUUGUGUAGCAC |
| siRNA 1330 | 1330 | UGCUACACAACAGACCCUG | 4354 | CAGGGUCUGUUGUGUAGCA |
| siRNA 1331 | 1331 | GCUACACAACAGACCCUGC | 4355 | GCAGGGUCUGUUGUGUAGC |
| siRNA 1332 | 1332 | CUACACAACAGACCCUGCU | 4356 | AGCAGGGUCUGUUGUGUAG |
| siRNA 1333 | 1333 | UACACAACAGACCCUGCUG | 4357 | CAGCAGGGUCUGUUGUGUA |
| siRNA 1334 | 1334 | ACACAACAGACCCUGCUGU | 4358 | ACAGCAGGGUCUGUUGUGU |
| siRNA 1335 | 1335 | CACAACAGACCCUGCUGUG | 4359 | CACAGCAGGGUCUGUUGUG |
| siRNA 1336 | 1336 | ACAACAGACCCUGCUGUGC | 4360 | GCACAGCAGGGUCUGUUGU |
| siRNA 1337 | 1337 | CAACAGACCCUGCUGUGCG | 4361 | CGCACAGCAGGGUCUGUUG |
| siRNA 1338 | 1338 | AACAGACCCUGCUGUGCGC | 4362 | GCGCACAGCAGGGUCUGUU |
| siRNA 1339 | 1339 | ACAGACCCUGCUGUGCGCU | 4363 | AGCGCACAGCAGGGUCUGU |
| siRNA 1340 | 1340 | CAGACCCUGCUGUGCGCUU | 4364 | AAGCGCACAGCAGGGUCUG |
| siRNA 1341 | 1341 | AGACCCUGCUGUGCGCUUC | 4365 | GAAGCGCACAGCAGGGUCU |
| siRNA 1342 | 1342 | GACCCUGCUGUGCGCUUCC | 4366 | GGAAGCGCACAGCAGGGUC |
| siRNA 1343 | 1343 | ACCCUGCUGUGCGCUUCCA | 4367 | UGGAAGCGCACAGCAGGGU |
| siRNA 1344 | 1344 | CCCUGCUGUGCGCUUCCAG | 4368 | CUGGAAGCGCACAGCAGGG |
| siRNA 1345 | 1345 | CCUGCUGUGCGCUUCCAGA | 4369 | UCUGGAAGCGCACAGCAGG |
| siRNA 1346 | 1346 | CUGCUGUGCGCUUCCAGAG | 4370 | CUCUGGAAGCGCACAGCAG |
| siRNA 1347 | 1347 | UGCUGUGCGCUUCCAGAGC | 4371 | GCUCUGGAAGCGCACAGCA |
| siRNA 1348 | 1348 | GCUGUGCGCUUCCAGAGCU | 4372 | AGCUCUGGAAGCGCACAGC |
| siRNA 1349 | 1349 | CUGUGCGCUUCCAGAGCUG | 4373 | CAGCUCUGGAAGCGCACAG |
| siRNA 1350 | 1350 | UGUGCGCUUCCAGAGCUGC | 4374 | GCAGCUCUGGAAGCGCACA |
| siRNA 1351 | 1351 | GUGCGCUUCCAGAGCUGCG | 4375 | CGCAGCUCUGGAAGCGCAC |
| siRNA 1352 | 1352 | UGCGCUUCCAGAGCUGCGG | 4376 | CCGCAGCUCUGGAAGCGCA |
| siRNA 1353 | 1353 | GCGCUUCCAGAGCUGCGGC | 4377 | GCCGCAGCUCUGGAAGCGC |
| siRNA 1354 | 1354 | CGCUUCCAGAGCUGCGGCA | 4378 | UGCCGCAGCUCUGGAAGCG |
| siRNA 1355 | 1355 | GCUUCCAGAGCUGCGGCAU | 4379 | AUGCCGCAGCUCUGGAAGC |
| siRNA 1356 | 1356 | CUUCCAGAGCUGCGGCAUC | 4380 | GAUGCCGCAGCUCUGGAAG |
| siRNA 1357 | 1357 | UUCCAGAGCUGCGGCAUCA | 4381 | UGAUGCCGCAGCUCUGGAA |
| siRNA 1358 | 1358 | UCCAGAGCUGCGGCAUCAA | 4382 | UUGAUGCCGCAGCUCUGGA |
| siRNA 1359 | 1359 | CCAGAGCUGCGGCAUCAAA | 4383 | UUUGAUGCCGCAGCUCUGG |
| siRNA 1360 | 1360 | CAGAGCUGCGGCAUCAAAU | 4384 | AUUUGAUGCCGCAGCUCUG |
| siRNA 1361 | 1361 | AGAGCUGCGGCAUCAAAUC | 4385 | GAUUUGAUGCCGCAGCUCU |
| siRNA 1362 | 1362 | GAGCUGCGGCAUCAAAUCC | 4386 | GGAUUUGAUGCCGCAGCUC |
| siRNA 1363 | 1363 | AGCUGCGGCAUCAAAUCCU | 4387 | AGGAUUUGAUGCCGCAGCU |
| siRNA 1364 | 1364 | GCUGCGGCAUCAAAUCCUG | 4388 | CAGGAUUUGAUGCCGCAGC |
| siRNA 1365 | 1365 | CUGCGGCAUCAAAUCCUGC | 4389 | GCAGGAUUUGAUGCCGCAG |
| siRNA 1366 | 1366 | UGCGGCAUCAAAUCCUGCC | 4390 | GGCAGGAUUUGAUGCCGCA |
| siRNA 1367 | 1367 | GCGGCAUCAAAUCCUGCCG | 4391 | CGGCAGGAUUUGAUGCCGC |
| siRNA 1368 | 1368 | CGGCAUCAAAUCCUGCCGG | 4392 | CCGGCAGGAUUUGAUGCCG |
| siRNA 1369 | 1369 | GGCAUCAAAUCCUGCCGGG | 4393 | CCCGGCAGGAUUUGAUGCC |
| siRNA 1370 | 1370 | GCAUCAAAUCCUGCCGGGA | 4394 | UCCCGGCAGGAUUUGAUGC |
| siRNA 1371 | 1371 | CAUCAAAUCCUGCCGGGAG | 4395 | CUCCCGGCAGGAUUUGAUG |
| siRNA 1372 | 1372 | AUCAAAUCCUGCCGGGAGG | 4396 | CCUCCCGGCAGGAUUUGAU |
| siRNA 1373 | 1373 | UCAAAUCCUGCCGGGAGGC | 4397 | GCCUCCCGGCAGGAUUUGA |
| siRNA 1374 | 1374 | CAAAUCCUGCCGGGAGGCC | 4398 | GGCCUCCCGGCAGGAUUUG |
| siRNA 1375 | 1375 | AAAUCCUGCCGGGAGGCCG | 4399 | CGGCCUCCCGGCAGGAUUU |
| siRNA 1376 | 1376 | AAUCCUGCCGGGAGGCCGC | 4400 | GCGGCCUCCCGGCAGGAUU |
| siRNA 1377 | 1377 | AUCCUGCCGGGAGGCCGCG | 4401 | CGCGGCCUCCCGGCAGGAU |
| SiRNA 1378 | 1378 | UCCUGCCGGGAGGCCGCGU | 4402 | ACGCGGCCUCCCGGCAGGA |
| siRNA 1379 | 1379 | CCUGCCGGGAGGCCGCGUG | 4403 | CACGCGGCCUCCCGGCAGG |
| siRNA 1380 | 1380 | CUGCCGGGAGGCCGCGUGU | 4404 | ACACGCGGCCUCCCGGCAG |
| siRNA 1381 | 1381 | UGCCGGGAGGCCGCGUGUG | 4405 | CACACGCGGCCUCCCGGCA |
| siRNA 1382 | 1382 | GCCGGGAGGCCGCGUGUGU | 4406 | ACACACGCGGCCUCCCGGC |
| siRNA 1383 | 1383 | CCGGGAGGCCGCGUGUGUC | 4407 | GACACACGCGGCCUCCCGG |
| siRNA 1384 | 1384 | CGGGAGGCCGCGUGUGUCU | 4408 | AGACACACGCGGCCUCCCG |
| siRNA 1385 | 1385 | GGGAGGCCGCGUGUGUCUG | 4409 | CAGACACACGCGGCCUCCC |
| siRNA 1386 | 1386 | GGAGGCCGCGUGUGUCUGG | 4410 | CCAGACACACGCGGCCUCC |
| siRNA 1387 | 1387 | GAGGCCGCGUGUGUCUGGU | 4411 | ACCAGACACACGCGGCCUC |
| siRNA 1388 | 1388 | AGGCCGCGUGUGUCUGGUG | 4412 | CACCAGACACACGCGGCCU |
| siRNA 1389 | 1389 | GGCCGCGUGUGUCUGGUGC | 4413 | GCACCAGACACACGCGGCC |
| siRNA 1390 | 1390 | GCCGCGUGUGUCUGGUGCA | 4414 | UGCACCAGACACACGCGGC |
| siRNA 1391 | 1391 | CCGCGUGUGUCUGGUGCAA | 4415 | UUGCACCAGACACACGCGG |
| siRNA 1392 | 1392 | CGCGUGUGUCUGGUGCAAU | 4416 | AUUGCACCAGACACACGCG |
| siRNA 1393 | 1393 | GCGUGUGUCUGGUGCAAUG | 4417 | CAUUGCACCAGACACACGC |
| siRNA 1394 | 1394 | CGUGUGUCUGGUGCAAUGG | 4418 | CCAUUGCACCAGACACACG |
| siRNA 1395 | 1395 | GUGUGUCUGGUGCAAUGGC | 4419 | GCCAUUGCACCAGACACAC |
| siRNA 1396 | 1396 | UGUGUCUGGUGCAAUGGCG | 4420 | CGCCAUUGCACCAGACACA |
| siRNA 1397 | 1397 | GUGUCUGGUGCAAUGGCGA | 4421 | UCGCCAUUGCACCAGACAC |
| siRNA 1398 | 1398 | UGUCUGGUGCAAUGGCGAG | 4422 | CUCGCCAUUGCACCAGACA |
| siRNA 1399 | 1399 | GUCUGGUGCAAUGGCGAGG | 4423 | CCUCGCCAUUGCACCAGAC |
| siRNA 1400 | 1400 | UCUGGUGCAAUGGCGAGGA | 4424 | UCCUCGCCAUUGCACCAGA |
| siRNA 1401 | 1401 | CUGGUGCAAUGGCGAGGAA | 4425 | UUCCUCGCCAUUGCACCAG |
| siRNA 1402 | 1402 | UGGUGCAAUGGCGAGGAAU | 4426 | AUUCCUCGCCAUUGCACCA |
| siRNA 1403 | 1403 | GGUGCAAUGGCGAGGAAUA | 4427 | UAUUCCUCGCCAUUGCACC |
| siRNA 1404 | 1404 | GUGCAAUGGCGAGGAAUAC | 4428 | GUAUUCCUCGCCAUUGCAC |
| siRNA 1405 | 1405 | UGCAAUGGCGAGGAAUACC | 4429 | GGUAUUCCUCGCCAUUGCA |
| siRNA 1406 | 1406 | GCAAUGGCGAGGAAUACCG | 4430 | CGGUAUUCCUCGCCAUUGC |
| siRNA 1407 | 1407 | CAAUGGCGAGGAAUACCGC | 4431 | GCGGUAUUCCUCGCCAUUG |
| siRNA 1408 | 1408 | AAUGGCGAGGAAUACCGCG | 4432 | CGCGGUAUUCCUCGCCAUU |
| siRNA 1409 | 1409 | AUGGCGAGGAAUACCGCGG | 4433 | CCGCGGUAUUCCUCGCCAU |
| siRNA 1410 | 1410 | UGGCGAGGAAUACCGCGGC | 4434 | GCCGCGGUAUUCCUCGCCA |
| siRNA 1411 | 1411 | GGCGAGGAAUACCGCGGCG | 4435 | CGCCGCGGUAUUCCUCGCC |
| siRNA 1412 | 1412 | GCGAGGAAUACCGCGGCGC | 4436 | GCGCCGCGGUAUUCCUCGC |
| siRNA 1413 | 1413 | CGAGGAAUACCGCGGCGCG | 4437 | CGCGCCGCGGUAUUCCUCG |
| siRNA 1414 | 1414 | GAGGAAUACCGCGGCGCGG | 4438 | CCGCGCCGCGGUAUUCCUC |
| siRNA 1415 | 1415 | AGGAAUACCGCGGCGCGGU | 4439 | ACCGCGCCGCGGUAUUCCU |
| siRNA 1416 | 1416 | GGAAUACCGCGGCGCGGUA | 4440 | UACCGCGCCGCGGUAUUCC |
| siRNA 1417 | 1417 | GAAUACCGCGGCGCGGUAG | 4441 | CUACCGCGCCGCGGUAUUC |
| siRNA 1418 | 1418 | AAUACCGCGGCGCGGUAGA | 4442 | UCUACCGCGCCGCGGUAUU |
| siRNA 1419 | 1419 | AUACCGCGGCGCGGUAGAC | 4443 | GUCUACCGCGCCGCGGUAU |
| siRNA 1420 | 1420 | UACCGCGGCGCGGUAGACC | 4444 | GGUCUACCGCGCCGCGGUA |
| siRNA 1421 | 1421 | ACCGCGGCGCGGUAGACCG | 4445 | CGGUCUACCGCGCCGCGGU |
| siRNA 1422 | 1422 | CCGCGGCGCGGUAGACCGC | 4446 | GCGGUCUACCGCGCCGCGG |
| siRNA 1423 | 1423 | CGCGGCGCGGUAGACCGCA | 4447 | UGCGGUCUACCGCGCCGCG |
| siRNA 1424 | 1424 | GCGGCGCGGUAGACCGCAC | 4448 | GUGCGGUCUACCGCGCCGC |
| siRNA 1425 | 1425 | CGGCGCGGUAGACCGCACG | 4449 | CGUGCGGUCUACCGCGCCG |
| siRNA 1426 | 1426 | GGCGCGGUAGACCGCACGG | 4450 | CCGUGCGGUCUACCGCGCC |
| siRNA 1427 | 1427 | GCGCGGUAGACCGCACGGA | 4451 | UCCGUGCGGUCUACCGCGC |
| siRNA 1428 | 1428 | CGCGGUAGACCGCACGGAG | 4452 | CUCCGUGCGGUCUACCGCG |
| siRNA 1429 | 1429 | GCGGUAGACCGCACGGAGU | 4453 | ACUCCGUGCGGUCUACCGC |
| siRNA 1430 | 1430 | CGGUAGACCGCACGGAGUC | 4454 | GACUCCGUGCGGUCUACCG |
| siRNA 1431 | 1431 | GGUAGACCGCACGGAGUCA | 4455 | UGACUCCGUGCGGUCUACC |
| siRNA 1432 | 1432 | GUAGACCGCACGGAGUCAG | 4456 | CUGACUCCGUGCGGUCUAC |
| siRNA 1433 | 1433 | UAGACCGCACGGAGUCAGG | 4457 | CCUGACUCCGUGCGGUCUA |
| siRNA 1434 | 1434 | AGACCGCACGGAGUCAGGG | 4458 | CCCUGACUCCGUGCGGUCU |
| siRNA 1435 | 1435 | GACCGCACGGAGUCAGGGC | 4459 | GCCCUGACUCCGUGCGGUC |
| siRNA 1436 | 1436 | ACCGCACGGAGUCAGGGCG | 4460 | CGCCCUGACUCCGUGCGGU |
| siRNA 1437 | 1437 | CCGCACGGAGUCAGGGCGC | 4461 | GCGCCCUGACUCCGUGCGG |
| siRNA 1438 | 1438 | CGCACGGAGUCAGGGCGCG | 4462 | CGCGCCCUGACUCCGUGCG |
| siRNA 1439 | 1439 | GCACGGAGUCAGGGCGCGA | 4463 | UCGCGCCCUGACUCCGUGC |
| siRNA 1440 | 1440 | CACGGAGUCAGGGCGCGAG | 4464 | CUCGCGCCCUGACUCCGUG |
| siRNA 1441 | 1441 | ACGGAGUCAGGGCGCGAGU | 4465 | ACUCGCGCCCUGACUCCGU |
| siRNA 1442 | 1442 | CGGAGUCAGGGCGCGAGUG | 4466 | CACUCGCGCCCUGACUCCG |
| siRNA 1443 | 1443 | GGAGUCAGGGCGCGAGUGC | 4467 | GCACUCGCGCCCUGACUCC |
| siRNA 1444 | 1444 | GAGUCAGGGCGCGAGUGCC | 4468 | GGCACUCGCGCCCUGACUC |
| siRNA 1445 | 1445 | AGUCAGGGCGCGAGUGCCA | 4469 | UGGCACUCGCGCCCUGACU |
| siRNA 1446 | 1446 | GUCAGGGCGCGAGUGCCAG | 4470 | CUGGCACUCGCGCCCUGAC |
| siRNA 1447 | 1447 | UCAGGGCGCGAGUGCCAGC | 4471 | GCUGGCACUCGCGCCCUGA |
| siRNA 1448 | 1448 | CAGGGCGCGAGUGCCAGCG | 4472 | CGCUGGCACUCGCGCCCUG |
| siRNA 1449 | 1449 | AGGGCGCGAGUGCCAGCGC | 4473 | GCGCUGGCACUCGCGCCCU |
| siRNA 1450 | 1450 | GGGCGCGAGUGCCAGCGCU | 4474 | AGCGCUGGCACUCGCGCCC |
| siRNA 1451 | 1451 | GGCGCGAGUGCCAGCGCUG | 4475 | CAGCGCUGGCACUCGCGCC |
| siRNA 1452 | 1452 | GCGCGAGUGCCAGCGCUGG | 4476 | CCAGCGCUGGCACUCGCGC |
| siRNA 1453 | 1453 | CGCGAGUGCCAGCGCUGGG | 4477 | CCCAGCGCUGGCACUCGCG |
| siRNA 1454 | 1454 | GCGAGUGCCAGCGCUGGGA | 4478 | UCCCAGCGCUGGCACUCGC |
| siRNA 1455 | 1455 | CGAGUGCCAGCGCUGGGAU | 4479 | AUCCCAGCGCUGGCACUCG |
| siRNA 1456 | 1456 | GAGUGCCAGCGCUGGGAUC | 4480 | GAUCCCAGCGCUGGCACUC |
| siRNA 1457 | 1457 | AGUGCCAGCGCUGGGAUCU | 4481 | AGAUCCCAGCGCUGGCACU |
| siRNA 1458 | 1458 | GUGCCAGCGCUGGGAUCUU | 4482 | AAGAUCCCAGCGCUGGCAC |
| siRNA 1459 | 1459 | UGCCAGCGCUGGGAUCUUC | 4483 | GAAGAUCCCAGCGCUGGCA |
| siRNA 1460 | 1460 | GCCAGCGCUGGGAUCUUCA | 4484 | UGAAGAUCCCAGCGCUGGC |
| siRNA 1461 | 1461 | CCAGCGCUGGGAUCUUCAG | 4485 | CUGAAGAUCCCAGCGCUGG |
| siRNA 1462 | 1462 | CAGCGCUGGGAUCUUCAGC | 4486 | GCUGAAGAUCCCAGCGCUG |
| siRNA 1463 | 1463 | AGCGCUGGGAUCUUCAGCA | 4487 | UGCUGAAGAUCCCAGCGCU |
| siRNA 1464 | 1464 | GCGCUGGGAUCUUCAGCAC | 4488 | GUGCUGAAGAUCCCAGCGC |
| siRNA 1465 | 1465 | CGCUGGGAUCUUCAGCACC | 4489 | GGUGCUGAAGAUCCCAGCG |
| siRNA 1466 | 1466 | GCUGGGAUCUUCAGCACCC | 4490 | GGGUGCUGAAGAUCCCAGC |
| siRNA 1467 | 1467 | CUGGGAUCUUCAGCACCCG | 4491 | CGGGUGCUGAAGAUCCCAG |
| siRNA 1468 | 1468 | UGGGAUCUUCAGCACCCGC | 4492 | GCGGGUGCUGAAGAUCCCA |
| siRNA 1469 | 1469 | GGGAUCUUCAGCACCCGCA | 4493 | UGCGGGUGCUGAAGAUCCC |
| siRNA 1470 | 1470 | GGAUCUUCAGCACCCGCAC | 4494 | GUGCGGGUGCUGAAGAUCC |
| siRNA 1471 | 1471 | GAUCUUCAGCACCCGCACC | 4495 | GGUGCGGGUGCUGAAGAUC |
| siRNA 1472 | 1472 | AUCUUCAGCACCCGCACCA | 4496 | UGGUGCGGGUGCUGAAGAU |
| siRNA 1473 | 1473 | UCUUCAGCACCCGCACCAG | 4497 | CUGGUGCGGGUGCUGAAGA |
| siRNA 1474 | 1474 | CUUCAGCACCCGCACCAGC | 4498 | GCUGGUGCGGGUGCUGAAG |
| siRNA 1475 | 1475 | UUCAGCACCCGCACCAGCA | 4499 | UGCUGGUGCGGGUGCUGAA |
| siRNA 1476 | 1476 | UCAGCACCCGCACCAGCAC | 4500 | GUGCUGGUGCGGGUGCUGA |
| siRNA 1477 | 1477 | CAGCACCCGCACCAGCACC | 4501 | GGUGCUGGUGCGGGUGCUG |
| siRNA 1478 | 1478 | AGCACCCGCACCAGCACCC | 4502 | GGGUGCUGGUGCGGGUGCU |
| siRNA 1479 | 1479 | GCACCCGCACCAGCACCCC | 4503 | GGGGUGCUGGUGCGGGUGC |
| siRNA 1480 | 1480 | CACCCGCACCAGCACCCCU | 4504 | AGGGGUGCUGGUGCGGGUG |
| siRNA 1481 | 1481 | ACCCGCACCAGCACCCCUU | 4505 | AAGGGGUGCUGGUGCGGGU |
| siRNA 1482 | 1482 | CCCGCACCAGCACCCCUUC | 4506 | GAAGGGGUGCUGGUGCGGG |
| siRNA 1483 | 1483 | CCGCACCAGCACCCCUUCG | 4507 | CGAAGGGGUGCUGGUGCGG |
| siRNA 1484 | 1484 | CGCACCAGCACCCCUUCGA | 4508 | UCGAAGGGGUGCUGGUGCG |
| siRNA 1485 | 1485 | GCACCAGCACCCCUUCGAG | 4509 | CUCGAAGGGGUGCUGGUGC |
| siRNA 1486 | 1486 | CACCAGCACCCCUUCGAGC | 4510 | GCUCGAAGGGGUGCUGGUG |
| siRNA 1487 | 1487 | ACCAGCACCCCUUCGAGCC | 4511 | GGCUCGAAGGGGUGCUGGU |
| siRNA 1488 | 1488 | CCAGCACCCCUUCGAGCCG | 4512 | CGGCUCGAAGGGGUGCUGG |
| siRNA 1489 | 1489 | CAGCACCCCUUCGAGCCGG | 4513 | CCGGCUCGAAGGGGUGCUG |
| siRNA 1490 | 1490 | AGCACCCCUUCGAGCCGGG | 4514 | CCCGGCUCGAAGGGGUGCU |
| siRNA 1491 | 1491 | GCACCCCUUCGAGCCGGGC | 4515 | GCCCGGCUCGAAGGGGUGC |
| siRNA 1492 | 1492 | CACCCCUUCGAGCCGGGCA | 4516 | UGCCCGGCUCGAAGGGGUG |
| siRNA 1493 | 1493 | ACCCCUUCGAGCCGGGCAA | 4517 | UUGCCCGGCUCGAAGGGGU |
| siRNA 1494 | 1494 | CCCCUUCGAGCCGGGCAAG | 4518 | CUUGCCCGGCUCGAAGGGG |
| siRNA 1495 | 1495 | CCCUUCGAGCCGGGCAAGU | 4519 | ACUUGCCCGGCUCGAAGGG |
| siRNA 1496 | 1496 | CCUUCGAGCCGGGCAAGUU | 4520 | AACUUGCCCGGCUCGAAGG |
| siRNA 1497 | 1497 | CUUCGAGCCGGGCAAGUUC | 4521 | GAACUUGCCCGGCUCGAAG |
| siRNA 1498 | 1498 | UUCGAGCCGGGCAAGUUCC | 4522 | GGAACUUGCCCGGCUCGAA |
| siRNA 1499 | 1499 | UCGAGCCGGGCAAGUUCCU | 4523 | AGGAACUUGCCCGGCUCGA |
| siRNA 1500 | 1500 | CGAGCCGGGCAAGUUCCUC | 4524 | GAGGAACUUGCCCGGCUCG |
| siRNA 1501 | 1501 | GAGCCGGGCAAGUUCCUCG | 4525 | CGAGGAACUUGCCCGGCUC |
| siRNA 1502 | 1502 | AGCCGGGCAAGUUCCUCGA | 4526 | UCGAGGAACUUGCCCGGCU |
| siRNA 1503 | 1503 | GCCGGGCAAGUUCCUCGAC | 4527 | GUCGAGGAACUUGCCCGGC |
| siRNA 1504 | 1504 | CCGGGCAAGUUCCUCGACC | 4528 | GGUCGAGGAACUUGCCCGG |
| siRNA 1505 | 1505 | CGGGCAAGUUCCUCGACCA | 4529 | UGGUCGAGGAACUUGCCCG |
| siRNA 1506 | 1506 | GGGCAAGUUCCUCGACCAA | 4530 | UUGGUCGAGGAACUUGCCC |
| siRNA 1507 | 1507 | GGCAAGUUCCUCGACCAAG | 4531 | CUUGGUCGAGGAACUUGCC |
| siRNA 1508 | 1508 | GCAAGUUCCUCGACCAAGG | 4532 | CCUUGGUCGAGGAACUUGC |
| siRNA 1509 | 1509 | CAAGUUCCUCGACCAAGGU | 4533 | ACCUUGGUCGAGGAACUUG |
| siRNA 1510 | 1510 | AAGUUCCUCGACCAAGGUC | 4534 | GACCUUGGUCGAGGAACUU |
| siRNA 1511 | 1511 | AGUUCCUCGACCAAGGUCU | 4535 | AGACCUUGGUCGAGGAACU |
| siRNA 1512 | 1512 | GUUCCUCGACCAAGGUCUG | 4536 | CAGACCUUGGUCGAGGAAC |
| siRNA 1513 | 1513 | UUCCUCGACCAAGGUCUGG | 4537 | CCAGACCUUGGUCGAGGAA |
| siRNA 1514 | 1514 | UCCUCGACCAAGGUCUGGA | 4538 | UCCAGACCUUGGUCGAGGA |
| siRNA 1515 | 1515 | CCUCGACCAAGGUCUGGAC | 4539 | GUCCAGACCUUGGUCGAGG |
| siRNA 1516 | 1516 | CUCGACCAAGGUCUGGACG | 4540 | CGUCCAGACCUUGGUCGAG |
| siRNA 1517 | 1517 | UCGACCAAGGUCUGGACGA | 4541 | UCGUCCAGACCUUGGUCGA |
| siRNA 1518 | 1518 | CGACCAAGGUCUGGACGAC | 4542 | GUCGUCCAGACCUUGGUCG |
| siRNA 1519 | 1519 | GACCAAGGUCUGGACGACA | 4543 | UGUCGUCCAGACCUUGGUC |
| siRNA 1520 | 1520 | ACCAAGGUCUGGACGACAA | 4544 | UUGUCGUCCAGACCUUGGU |
| siRNA 1521 | 1521 | CCAAGGUCUGGACGACAAC | 4545 | GUUGUCGUCCAGACCUUGG |
| siRNA 1522 | 1522 | CAAGGUCUGGACGACAACU | 4546 | AGUUGUCGUCCAGACCUUG |
| siRNA 1523 | 1523 | AAGGUCUGGACGACAACUA | 4547 | UAGUUGUCGUCCAGACCUU |
| siRNA 1524 | 1524 | AGGUCUGGACGACAACUAU | 4548 | AUAGUUGUCGUCCAGACCU |
| siRNA 1525 | 1525 | GGUCUGGACGACAACUAUU | 4549 | AAUAGUUGUCGUCCAGACC |
| siRNA 1526 | 1526 | GUCUGGACGACAACUAUUG | 4550 | CAAUAGUUGUCGUCCAGAC |
| siRNA 1527 | 1527 | UCUGGACGACAACUAUUGC | 4551 | GCAAUAGUUGUCGUCCAGA |
| siRNA 1528 | 1528 | CUGGACGACAACUAUUGCC | 4552 | GGCAAUAGUUGUCGUCCAG |
| siRNA 1529 | 1529 | UGGACGACAACUAUUGCCG | 4553 | CGGCAAUAGUUGUCGUCCA |
| siRNA 1530 | 1530 | GGACGACAACUAUUGCCGG | 4554 | CCGGCAAUAGUUGUCGUCC |
| siRNA 1531 | 1531 | GACGACAACUAUUGCCGGA | 4555 | UCCGGCAAUAGUUGUCGUC |
| siRNA 1532 | 1532 | ACGACAACUAUUGCCGGAA | 4556 | UUCCGGCAAUAGUUGUCGU |
| siRNA 1533 | 1533 | CGACAACUAUUGCCGGAAU | 4557 | AUUCCGGCAAUAGUUGUCG |
| siRNA 1534 | 1534 | GACAACUAUUGCCGGAAUC | 4558 | GAUUCCGGCAAUAGUUGUC |
| siRNA 1535 | 1535 | ACAACUAUUGCCGGAAUCC | 4559 | GGAUUCCGGCAAUAGUUGU |
| siRNA 1536 | 1536 | CAACUAUUGCCGGAAUCCU | 4560 | AGGAUUCCGGCAAUAGUUG |
| siRNA 1537 | 1537 | AACUAUUGCCGGAAUCCUG | 4561 | CAGGAUUCCGGCAAUAGUU |
| siRNA 1538 | 1538 | ACUAUUGCCGGAAUCCUGA | 4562 | UCAGGAUUCCGGCAAUAGU |
| siRNA 1539 | 1539 | CUAUUGCCGGAAUCCUGAC | 4563 | GUCAGGAUUCCGGCAAUAG |
| siRNA 1540 | 1540 | UAUUGCCGGAAUCCUGACG | 4564 | CGUCAGGAUUCCGGCAAUA |
| siRNA 1541 | 1541 | AUUGCCGGAAUCCUGACGG | 4565 | CCGUCAGGAUUCCGGCAAU |
| siRNA 1542 | 1542 | UUGCCGGAAUCCUGACGGC | 4566 | GCCGUCAGGAUUCCGGCAA |
| siRNA 1543 | 1543 | UGCCGGAAUCCUGACGGCU | 4567 | AGCCGUCAGGAUUCCGGCA |
| siRNA 1544 | 1544 | GCCGGAAUCCUGACGGCUC | 4568 | GAGCCGUCAGGAUUCCGGC |
| siRNA 1545 | 1545 | CCGGAAUCCUGACGGCUCC | 4569 | GGAGCCGUCAGGAUUCCGG |
| siRNA 1546 | 1546 | CGGAAUCCUGACGGCUCCG | 4570 | CGGAGCCGUCAGGAUUCCG |
| siRNA 1547 | 1547 | GGAAUCCUGACGGCUCCGA | 4571 | UCGGAGCCGUCAGGAUUCC |
| siRNA 1548 | 1548 | GAAUCCUGACGGCUCCGAG | 4572 | CUCGGAGCCGUCAGGAUUC |
| siRNA 1549 | 1549 | AAUCCUGACGGCUCCGAGC | 4573 | GCUCGGAGCCGUCAGGAUU |
| siRNA 1550 | 1550 | AUCCUGACGGCUCCGAGCG | 4574 | CGCUCGGAGCCGUCAGGAU |
| siRNA 1551 | 1551 | UCCUGACGGCUCCGAGCGG | 4575 | CCGCUCGGAGCCGUCAGGA |
| siRNA 1552 | 1552 | CCUGACGGCUCCGAGCGGC | 4576 | GCCGCUCGGAGCCGUCAGG |
| siRNA 1553 | 1553 | CUGACGGCUCCGAGCGGCC | 4577 | GGCCGCUCGGAGCCGUCAG |
| siRNA 1554 | 1554 | UGACGGCUCCGAGCGGCCA | 4578 | UGGCCGCUCGGAGCCGUCA |
| siRNA 1555 | 1555 | GACGGCUCCGAGCGGCCAU | 4579 | AUGGCCGCUCGGAGCCGUC |
| siRNA 1556 | 1556 | ACGGCUCCGAGCGGCCAUG | 4580 | CAUGGCCGCUCGGAGCCGU |
| siRNA 1557 | 1557 | CGGCUCCGAGCGGCCAUGG | 4581 | CCAUGGCCGCUCGGAGCCG |
| siRNA 1558 | 1558 | GGCUCCGAGCGGCCAUGGU | 4582 | ACCAUGGCCGCUCGGAGCC |
| siRNA 1559 | 1559 | GCUCCGAGCGGCCAUGGUG | 4583 | CACCAUGGCCGCUCGGAGC |
| siRNA 1560 | 1560 | CUCCGAGCGGCCAUGGUGC | 4584 | GCACCAUGGCCGCUCGGAG |
| siRNA 1561 | 1561 | UCCGAGCGGCCAUGGUGCU | 4585 | AGCACCAUGGCCGCUCGGA |
| siRNA 1562 | 1562 | CCGAGCGGCCAUGGUGCUA | 4586 | UAGCACCAUGGCCGCUCGG |
| siRNA 1563 | 1563 | CGAGCGGCCAUGGUGCUAC | 4587 | GUAGCACCAUGGCCGCUCG |
| siRNA 1564 | 1564 | GAGCGGCCAUGGUGCUACA | 4588 | UGUAGCACCAUGGCCGCUC |
| siRNA 1565 | 1565 | AGCGGCCAUGGUGCUACAC | 4589 | GUGUAGCACCAUGGCCGCU |
| siRNA 1566 | 1566 | GCGGCCAUGGUGCUACACU | 4590 | AGUGUAGCACCAUGGCCGC |
| siRNA 1567 | 1567 | CGGCCAUGGUGCUACACUA | 4591 | UAGUGUAGCACCAUGGCCG |
| siRNA 1568 | 1568 | GGCCAUGGUGCUACACUAC | 4592 | GUAGUGUAGCACCAUGGCC |
| siRNA 1569 | 1569 | GCCAUGGUGCUACACUACG | 4593 | CGUAGUGUAGCACCAUGGC |
| siRNA 1570 | 1570 | CCAUGGUGCUACACUACGG | 4594 | CCGUAGUGUAGCACCAUGG |
| siRNA 1571 | 1571 | CAUGGUGCUACACUACGGA | 4595 | UCCGUAGUGUAGCACCAUG |
| siRNA 1572 | 1572 | AUGGUGCUACACUACGGAU | 4596 | AUCCGUAGUGUAGCACCAU |
| siRNA 1573 | 1573 | UGGUGCUACACUACGGAUC | 4597 | GAUCCGUAGUGUAGCACCA |
| siRNA 1574 | 1574 | GGUGCUACACUACGGAUCC | 4598 | GGAUCCGUAGUGUAGCACC |
| siRNA 1575 | 1575 | GUGCUACACUACGGAUCCG | 4599 | CGGAUCCGUAGUGUAGCAC |
| siRNA 1576 | 1576 | UGCUACACUACGGAUCCGC | 4600 | GCGGAUCCGUAGUGUAGCA |
| siRNA 1577 | 1577 | GCUACACUACGGAUCCGCA | 4601 | UGCGGAUCCGUAGUGUAGC |
| siRNA 1578 | 1578 | CUACACUACGGAUCCGCAG | 4602 | CUGCGGAUCCGUAGUGUAG |
| siRNA 1579 | 1579 | UACACUACGGAUCCGCAGA | 4603 | UCUGCGGAUCCGUAGUGUA |
| siRNA 1580 | 1580 | ACACUACGGAUCCGCAGAU | 4604 | AUCUGCGGAUCCGUAGUGU |
| siRNA 1581 | 1581 | CACUACGGAUCCGCAGAUC | 4605 | GAUCUGCGGAUCCGUAGUG |
| siRNA 1582 | 1582 | ACUACGGAUCCGCAGAUCG | 4606 | CGAUCUGCGGAUCCGUAGU |
| siRNA 1583 | 1583 | CUACGGAUCCGCAGAUCGA | 4607 | UCGAUCUGCGGAUCCGUAG |
| siRNA 1584 | 1584 | UACGGAUCCGCAGAUCGAG | 4608 | CUCGAUCUGCGGAUCCGUA |
| siRNA 1585 | 1585 | ACGGAUCCGCAGAUCGAGC | 4609 | GCUCGAUCUGCGGAUCCGU |
| siRNA 1586 | 1586 | CGGAUCCGCAGAUCGAGCG | 4610 | CGCUCGAUCUGCGGAUCCG |
| siRNA 1587 | 1587 | GGAUCCGCAGAUCGAGCGA | 4611 | UCGCUCGAUCUGCGGAUCC |
| siRNA 1588 | 1588 | GAUCCGCAGAUCGAGCGAG | 4612 | CUCGCUCGAUCUGCGGAUC |
| siRNA 1589 | 1589 | AUCCGCAGAUCGAGCGAGA | 4613 | UCUCGCUCGAUCUGCGGAU |
| siRNA 1590 | 1590 | UCCGCAGAUCGAGCGAGAG | 4614 | CUCUCGCUCGAUCUGCGGA |
| siRNA 1591 | 1591 | CCGCAGAUCGAGCGAGAGU | 4615 | ACUCUCGCUCGAUCUGCGG |
| siRNA 1592 | 1592 | CGCAGAUCGAGCGAGAGUU | 4616 | AACUCUCGCUCGAUCUGCG |
| siRNA 1593 | 1593 | GCAGAUCGAGCGAGAGUUC | 4617 | GAACUCUCGCUCGAUCUGC |
| siRNA 1594 | 1594 | CAGAUCGAGCGAGAGUUCU | 4618 | AGAACUCUCGCUCGAUCUG |
| siRNA 1595 | 1595 | AGAUCGAGCGAGAGUUCUG | 4619 | CAGAACUCUCGCUCGAUCU |
| siRNA 1596 | 1596 | GAUCGAGCGAGAGUUCUGU | 4620 | ACAGAACUCUCGCUCGAUC |
| siRNA 1597 | 1597 | AUCGAGCGAGAGUUCUGUG | 4621 | CACAGAACUCUCGCUCGAU |
| siRNA 1598 | 1598 | UCGAGCGAGAGUUCUGUGA | 4622 | UCACAGAACUCUCGCUCGA |
| siRNA 1599 | 1599 | CGAGCGAGAGUUCUGUGAC | 4623 | GUCACAGAACUCUCGCUCG |
| siRNA 1600 | 1600 | GAGCGAGAGUUCUGUGACC | 4624 | GGUCACAGAACUCUCGCUC |
| siRNA 1601 | 1601 | AGCGAGAGUUCUGUGACCU | 4625 | AGGUCACAGAACUCUCGCU |
| siRNA 1602 | 1602 | GCGAGAGUUCUGUGACCUC | 4626 | GAGGUCACAGAACUCUCGC |
| siRNA 1603 | 1603 | CGAGAGUUCUGUGACCUCC | 4627 | GGAGGUCACAGAACUCUCG |
| siRNA 1604 | 1604 | GAGAGUUCUGUGACCUCCC | 4628 | GGGAGGUCACAGAACUCUC |
| siRNA 1605 | 1605 | AGAGUUCUGUGACCUCCCC | 4629 | GGGGAGGUCACAGAACUCU |
| siRNA 1606 | 1606 | GAGUUCUGUGACCUCCCCC | 4630 | GGGGGAGGUCACAGAACUC |
| siRNA 1607 | 1607 | AGUUCUGUGACCUCCCCCG | 4631 | CGGGGGAGGUCACAGAACU |
| siRNA 1608 | 1608 | GUUCUGUGACCUCCCCCGC | 4632 | GCGGGGGAGGUCACAGAAC |
| siRNA 1609 | 1609 | UUCUGUGACCUCCCCCGCU | 4633 | AGCGGGGGAGGUCACAGAA |
| siRNA 1610 | 1610 | UCUGUGACCUCCCCCGCUG | 4634 | CAGCGGGGGAGGUCACAGA |
| siRNA 1611 | 1611 | CUGUGACCUCCCCCGCUGC | 4635 | GCAGCGGGGGAGGUCACAG |
| siRNA 1612 | 1612 | UGUGACCUCCCCCGCUGCG | 4636 | CGCAGCGGGGGAGGUCACA |
| siRNA 1613 | 1613 | GUGACCUCCCCCGCUGCGG | 4637 | CCGCAGCGGGGGAGGUCAC |
| siRNA 1614 | 1614 | UGACCUCCCCCGCUGCGGG | 4638 | CCCGCAGCGGGGGAGGUCA |
| siRNA 1615 | 1615 | GACCUCCCCCGCUGCGGGU | 4639 | ACCCGCAGCGGGGGAGGUC |
| siRNA 1616 | 1616 | ACCUCCCCCGCUGCGGGUC | 4640 | GACCCGCAGCGGGGGAGGU |
| siRNA 1617 | 1617 | CCUCCCCCGCUGCGGGUCC | 4641 | GGACCCGCAGCGGGGGAGG |
| siRNA 1618 | 1618 | CUCCCCCGCUGCGGGUCCG | 4642 | CGGACCCGCAGCGGGGGAG |
| siRNA 1619 | 1619 | UCCCCCGCUGCGGGUCCGA | 4643 | UCGGACCCGCAGCGGGGGA |
| siRNA 1620 | 1620 | CCCCCGCUGCGGGUCCGAG | 4644 | CUCGGACCCGCAGCGGGGG |
| siRNA 1621 | 1621 | CCCCGCUGCGGGUCCGAGG | 4645 | CCUCGGACCCGCAGCGGGG |
| siRNA 1622 | 1622 | CCCGCUGCGGGUCCGAGGC | 4646 | GCCUCGGACCCGCAGCGGG |
| siRNA 1623 | 1623 | CCGCUGCGGGUCCGAGGCA | 4647 | UGCCUCGGACCCGCAGCGG |
| siRNA 1624 | 1624 | CGCUGCGGGUCCGAGGCAC | 4648 | GUGCCUCGGACCCGCAGCG |
| siRNA 1625 | 1625 | GCUGCGGGUCCGAGGCACA | 4649 | UGUGCCUCGGACCCGCAGC |
| siRNA 1626 | 1626 | CUGCGGGUCCGAGGCACAG | 4650 | CUGUGCCUCGGACCCGCAG |
| siRNA 1627 | 1627 | UGCGGGUCCGAGGCACAGC | 4651 | GCUGUGCCUCGGACCCGCA |
| siRNA 1628 | 1628 | GCGGGUCCGAGGCACAGCC | 4652 | GGCUGUGCCUCGGACCCGC |
| siRNA 1629 | 1629 | CGGGUCCGAGGCACAGCCC | 4653 | GGGCUGUGCCUCGGACCCG |
| siRNA 1630 | 1630 | GGGUCCGAGGCACAGCCCC | 4654 | GGGGCUGUGCCUCGGACCC |
| siRNA 1631 | 1631 | GGUCCGAGGCACAGCCCCG | 4655 | CGGGGCUGUGCCUCGGACC |
| siRNA 1632 | 1632 | GUCCGAGGCACAGCCCCGC | 4656 | GCGGGGCUGUGCCUCGGAC |
| siRNA 1633 | 1633 | UCCGAGGCACAGCCCCGCC | 4657 | GGCGGGGCUGUGCCUCGGA |
| siRNA 1634 | 1634 | CCGAGGCACAGCCCCGCCA | 4658 | UGGCGGGGCUGUGCCUCGG |
| siRNA 1635 | 1635 | CGAGGCACAGCCCCGCCAA | 4659 | UUGGCGGGGCUGUGCCUCG |
| siRNA 1636 | 1636 | GAGGCACAGCCCCGCCAAG | 4660 | CUUGGCGGGGCUGUGCCUC |
| siRNA 1637 | 1637 | AGGCACAGCCCCGCCAAGA | 4661 | UCUUGGCGGGGCUGUGCCU |
| siRNA 1638 | 1638 | GGCACAGCCCCGCCAAGAG | 4662 | CUCUUGGCGGGGCUGUGCC |
| siRNA 1639 | 1639 | GCACAGCCCCGCCAAGAGG | 4663 | CCUCUUGGCGGGGCUGUGC |
| siRNA 1640 | 1640 | CACAGCCCCGCCAAGAGGC | 4664 | GCCUCUUGGCGGGGCUGUG |
| siRNA 1641 | 1641 | ACAGCCCCGCCAAGAGGCC | 4665 | GGCCUCUUGGCGGGGCUGU |
| siRNA 1642 | 1642 | CAGCCCCGCCAAGAGGCCA | 4666 | UGGCCUCUUGGCGGGGCUG |
| siRNA 1643 | 1643 | AGCCCCGCCAAGAGGCCAC | 4667 | GUGGCCUCUUGGCGGGGCU |
| siRNA 1644 | 1644 | GCCCCGCCAAGAGGCCACA | 4668 | UGUGGCCUCUUGGCGGGGC |
| siRNA 1645 | 1645 | CCCCGCCAAGAGGCCACAA | 4669 | UUGUGGCCUCUUGGCGGGG |
| siRNA 1646 | 1646 | CCCGCCAAGAGGCCACAAC | 4670 | GUUGUGGCCUCUUGGCGGG |
| siRNA 1647 | 1647 | CCGCCAAGAGGCCACAACU | 4671 | AGUUGUGGCCUCUUGGCGG |
| siRNA 1648 | 1648 | CGCCAAGAGGCCACAACUG | 4672 | CAGUUGUGGCCUCUUGGCG |
| siRNA 1649 | 1649 | GCCAAGAGGCCACAACUGU | 4673 | ACAGUUGUGGCCUCUUGGC |
| siRNA 1650 | 1650 | CCAAGAGGCCACAACUGUC | 4674 | GACAGUUGUGGCCUCUUGG |
| siRNA 1651 | 1651 | CAAGAGGCCACAACUGUCA | 4675 | UGACAGUUGUGGCCUCUUG |
| siRNA 1652 | 1652 | AAGAGGCCACAACUGUCAG | 4676 | CUGACAGUUGUGGCCUCUU |
| siRNA 1653 | 1653 | AGAGGCCACAACUGUCAGC | 4677 | GCUGACAGUUGUGGCCUCU |
| siRNA 1654 | 1654 | GAGGCCACAACUGUCAGCU | 4678 | AGCUGACAGUUGUGGCCUC |
| siRNA 1655 | 1655 | AGGCCACAACUGUCAGCUG | 4679 | CAGCUGACAGUUGUGGCCU |
| siRNA 1656 | 1656 | GGCCACAACUGUCAGCUGC | 4680 | GCAGCUGACAGUUGUGGCC |
| siRNA 1657 | 1657 | GCCACAACUGUCAGCUGCU | 4681 | AGCAGCUGACAGUUGUGGC |
| siRNA 1658 | 1658 | CCACAACUGUCAGCUGCUU | 4682 | AAGCAGCUGACAGUUGUGG |
| siRNA 1659 | 1659 | CACAACUGUCAGCUGCUUC | 4683 | GAAGCAGCUGACAGUUGUG |
| siRNA 1660 | 1660 | ACAACUGUCAGCUGCUUCC | 4684 | GGAAGCAGCUGACAGUUGU |
| siRNA 1661 | 1661 | CAACUGUCAGCUGCUUCCG | 4685 | CGGAAGCAGCUGACAGUUG |
| siRNA 1662 | 1662 | AACUGUCAGCUGCUUCCGC | 4686 | GCGGAAGCAGCUGACAGUU |
| siRNA 1663 | 1663 | ACUGUCAGCUGCUUCCGCG | 4687 | CGCGGAAGCAGCUGACAGU |
| siRNA 1664 | 1664 | CUGUCAGCUGCUUCCGCGG | 4688 | CCGCGGAAGCAGCUGACAG |
| siRNA 1665 | 1665 | UGUCAGCUGCUUCCGCGGG | 4689 | CCCGCGGAAGCAGCUGACA |
| siRNA 1666 | 1666 | GUCAGCUGCUUCCGCGGGA | 4690 | UCCCGCGGAAGCAGCUGAC |
| siRNA 1667 | 1667 | UCAGCUGCUUCCGCGGGAA | 4691 | UUCCCGCGGAAGCAGCUGA |
| siRNA 1668 | 1668 | CAGCUGCUUCCGCGGGAAG | 4692 | CUUCCCGCGGAAGCAGCUG |
| siRNA 1669 | 1669 | AGCUGCUUCCGCGGGAAGG | 4693 | CCUUCCCGCGGAAGCAGCU |
| siRNA 1670 | 1670 | GCUGCUUCCGCGGGAAGGG | 4694 | CCCUUCCCGCGGAAGCAGC |
| siRNA 1671 | 1671 | CUGCUUCCGCGGGAAGGGU | 4695 | ACCCUUCCCGCGGAAGCAG |
| siRNA 1672 | 1672 | UGCUUCCGCGGGAAGGGUG | 4696 | CACCCUUCCCGCGGAAGCA |
| siRNA 1673 | 1673 | GCUUCCGCGGGAAGGGUGA | 4697 | UCACCCUUCCCGCGGAAGC |
| siRNA 1674 | 1674 | CUUCCGCGGGAAGGGUGAG | 4698 | CUCACCCUUCCCGCGGAAG |
| siRNA 1675 | 1675 | UUCCGCGGGAAGGGUGAGG | 4699 | CCUCACCCUUCCCGCGGAA |
| siRNA 1676 | 1676 | UCCGCGGGAAGGGUGAGGG | 4700 | CCCUCACCCUUCCCGCGGA |
| siRNA 1677 | 1677 | CCGCGGGAAGGGUGAGGGC | 4701 | GCCCUCACCCUUCCCGCGG |
| siRNA 1678 | 1678 | CGCGGGAAGGGUGAGGGCU | 4702 | AGCCCUCACCCUUCCCGCG |
| siRNA 1679 | 1679 | GCGGGAAGGGUGAGGGCUA | 4703 | UAGCCCUCACCCUUCCCGC |
| siRNA 1680 | 1680 | CGGGAAGGGUGAGGGCUAC | 4704 | GUAGCCCUCACCCUUCCCG |
| siRNA 1681 | 1681 | GGGAAGGGUGAGGGCUACC | 4705 | GGUAGCCCUCACCCUUCCC |
| siRNA 1682 | 1682 | GGAAGGGUGAGGGCUACCG | 4706 | CGGUAGCCCUCACCCUUCC |
| siRNA 1683 | 1683 | GAAGGGUGAGGGCUACCGG | 4707 | CCGGUAGCCCUCACCCUUC |
| siRNA 1684 | 1684 | AAGGGUGAGGGCUACCGGG | 4708 | CCCGGUAGCCCUCACCCUU |
| siRNA 1685 | 1685 | AGGGUGAGGGCUACCGGGG | 4709 | CCCCGGUAGCCCUCACCCU |
| siRNA 1686 | 1686 | GGGUGAGGGCUACCGGGGC | 4710 | GCCCCGGUAGCCCUCACCC |
| siRNA 1687 | 1687 | GGUGAGGGCUACCGGGGCA | 4711 | UGCCCCGGUAGCCCUCACC |
| siRNA 1688 | 1688 | GUGAGGGCUACCGGGGCAC | 4712 | GUGCCCCGGUAGCCCUCAC |
| siRNA 1689 | 1689 | UGAGGGCUACCGGGGCACA | 4713 | UGUGCCCCGGUAGCCCUCA |
| siRNA 1690 | 1690 | GAGGGCUACCGGGGCACAG | 4714 | CUGUGCCCCGGUAGCCCUC |
| siRNA 1691 | 1691 | AGGGCUACCGGGGCACAGC | 4715 | GCUGUGCCCCGGUAGCCCU |
| siRNA 1692 | 1692 | GGGCUACCGGGGCACAGCC | 4716 | GGCUGUGCCCCGGUAGCCC |
| siRNA 1693 | 1693 | GGCUACCGGGGCACAGCCA | 4717 | UGGCUGUGCCCCGGUAGCC |
| siRNA 1694 | 1694 | GCUACCGGGGCACAGCCAA | 4718 | UUGGCUGUGCCCCGGUAGC |
| siRNA 1695 | 1695 | CUACCGGGGCACAGCCAAU | 4719 | AUUGGCUGUGCCCCGGUAG |
| siRNA 1696 | 1696 | UACCGGGGCACAGCCAAUA | 4720 | UAUUGGCUGUGCCCCGGUA |
| siRNA 1697 | 1697 | ACCGGGGCACAGCCAAUAC | 4721 | GUAUUGGCUGUGCCCCGGU |
| siRNA 1698 | 1698 | CCGGGGCACAGCCAAUACC | 4722 | GGUAUUGGCUGUGCCCCGG |
| siRNA 1699 | 1699 | CGGGGCACAGCCAAUACCA | 4723 | UGGUAUUGGCUGUGCCCCG |
| siRNA 1700 | 1700 | GGGGCACAGCCAAUACCAC | 4724 | GUGGUAUUGGCUGUGCCCC |
| siRNA 1701 | 1701 | GGGCACAGCCAAUACCACC | 4725 | GGUGGUAUUGGCUGUGCCC |
| siRNA 1702 | 1702 | GGCACAGCCAAUACCACCA | 4726 | UGGUGGUAUUGGCUGUGCC |
| siRNA 1703 | 1703 | GCACAGCCAAUACCACCAC | 4727 | GUGGUGGUAUUGGCUGUGC |
| siRNA 1704 | 1704 | CACAGCCAAUACCACCACU | 4728 | AGUGGUGGUAUUGGCUGUG |
| siRNA 1705 | 1705 | ACAGCCAAUACCACCACUG | 4729 | CAGUGGUGGUAUUGGCUGU |
| siRNA 1706 | 1706 | CAGCCAAUACCACCACUGC | 4730 | GCAGUGGUGGUAUUGGCUG |
| siRNA 1707 | 1707 | AGCCAAUACCACCACUGCG | 4731 | CGCAGUGGUGGUAUUGGCU |
| siRNA 1708 | 1708 | GCCAAUACCACCACUGCGG | 4732 | CCGCAGUGGUGGUAUUGGC |
| siRNA 1709 | 1709 | CCAAUACCACCACUGCGGG | 4733 | CCCGCAGUGGUGGUAUUGG |
| siRNA 1710 | 1710 | CAAUACCACCACUGCGGGC | 4734 | GCCCGCAGUGGUGGUAUUG |
| siRNA 1711 | 1711 | AAUACCACCACUGCGGGCG | 4735 | CGCCCGCAGUGGUGGUAUU |
| siRNA 1712 | 1712 | AUACCACCACUGCGGGCGU | 4736 | ACGCCCGCAGUGGUGGUAU |
| siRNA 1713 | 1713 | UACCACCACUGCGGGCGUA | 4737 | UACGCCCGCAGUGGUGGUA |
| siRNA 1714 | 1714 | ACCACCACUGCGGGCGUAC | 4738 | GUACGCCCGCAGUGGUGGU |
| siRNA 1715 | 1715 | CCACCACUGCGGGCGUACC | 4739 | GGUACGCCCGCAGUGGUGG |
| siRNA 1716 | 1716 | CACCACUGCGGGCGUACCU | 4740 | AGGUACGCCCGCAGUGGUG |
| siRNA 1717 | 1717 | ACCACUGCGGGCGUACCUU | 4741 | AAGGUACGCCCGCAGUGGU |
| siRNA 1718 | 1718 | CCACUGCGGGCGUACCUUG | 4742 | CAAGGUACGCCCGCAGUGG |
| siRNA 1719 | 1719 | CACUGCGGGCGUACCUUGC | 4743 | GCAAGGUACGCCCGCAGUG |
| siRNA 1720 | 1720 | ACUGCGGGCGUACCUUGCC | 4744 | GGCAAGGUACGCCCGCAGU |
| siRNA 1721 | 1721 | CUGCGGGCGUACCUUGCCA | 4745 | UGGCAAGGUACGCCCGCAG |
| siRNA 1722 | 1722 | UGCGGGCGUACCUUGCCAG | 4746 | CUGGCAAGGUACGCCCGCA |
| siRNA 1723 | 1723 | GCGGGCGUACCUUGCCAGC | 4747 | GCUGGCAAGGUACGCCCGC |
| siRNA 1724 | 1724 | CGGGCGUACCUUGCCAGCG | 4748 | CGCUGGCAAGGUACGCCCG |
| siRNA 1725 | 1725 | GGGCGUACCUUGCCAGCGU | 4749 | ACGCUGGCAAGGUACGCCC |
| siRNA 1726 | 1726 | GGCGUACCUUGCCAGCGUU | 4750 | AACGCUGGCAAGGUACGCC |
| siRNA 1727 | 1727 | GCGUACCUUGCCAGCGUUG | 4751 | CAACGCUGGCAAGGUACGC |
| siRNA 1728 | 1728 | CGUACCUUGCCAGCGUUGG | 4752 | CCAACGCUGGCAAGGUACG |
| siRNA 1729 | 1729 | GUACCUUGCCAGCGUUGGG | 4753 | CCCAACGCUGGCAAGGUAC |
| siRNA 1730 | 1730 | UACCUUGCCAGCGUUGGGA | 4754 | UCCCAACGCUGGCAAGGUA |
| siRNA 1731 | 1731 | ACCUUGCCAGCGUUGGGAC | 4755 | GUCCCAACGCUGGCAAGGU |
| siRNA 1732 | 1732 | CCUUGCCAGCGUUGGGACG | 4756 | CGUCCCAACGCUGGCAAGG |
| siRNA 1733 | 1733 | CUUGCCAGCGUUGGGACGC | 4757 | GCGUCCCAACGCUGGCAAG |
| siRNA 1734 | 1734 | UUGCCAGCGUUGGGACGCG | 4758 | CGCGUCCCAACGCUGGCAA |
| siRNA 1735 | 1735 | UGCCAGCGUUGGGACGCGC | 4759 | GCGCGUCCCAACGCUGGCA |
| siRNA 1736 | 1736 | GCCAGCGUUGGGACGCGCA | 4760 | UGCGCGUCCCAACGCUGGC |
| siRNA 1737 | 1737 | CCAGCGUUGGGACGCGCAA | 4761 | UUGCGCGUCCCAACGCUGG |
| siRNA 1738 | 1738 | CAGCGUUGGGACGCGCAAA | 4762 | UUUGCGCGUCCCAACGCUG |
| siRNA 1739 | 1739 | AGCGUUGGGACGCGCAAAU | 4763 | AUUUGCGCGUCCCAACGCU |
| siRNA 1740 | 1740 | GCGUUGGGACGCGCAAAUC | 4764 | GAUUUGCGCGUCCCAACGC |
| siRNA 1741 | 1741 | CGUUGGGACGCGCAAAUCC | 4765 | GGAUUUGCGCGUCCCAACG |
| siRNA 1742 | 1742 | GUUGGGACGCGCAAAUCCC | 4766 | GGGAUUUGCGCGUCCCAAC |
| siRNA 1743 | 1743 | UUGGGACGCGCAAAUCCCG | 4767 | CGGGAUUUGCGCGUCCCAA |
| siRNA 1744 | 1744 | UGGGACGCGCAAAUCCCGC | 4768 | GCGGGAUUUGCGCGUCCCA |
| siRNA 1745 | 1745 | GGGACGCGCAAAUCCCGCA | 4769 | UGCGGGAUUUGCGCGUCCC |
| siRNA 1746 | 1746 | GGACGCGCAAAUCCCGCAU | 4770 | AUGCGGGAUUUGCGCGUCC |
| siRNA 1747 | 1747 | GACGCGCAAAUCCCGCAUC | 4771 | GAUGCGGGAUUUGCGCGUC |
| siRNA 1748 | 1748 | ACGCGCAAAUCCCGCAUCA | 4772 | UGAUGCGGGAUUUGCGCGU |
| siRNA 1749 | 1749 | CGCGCAAAUCCCGCAUCAG | 4773 | CUGAUGCGGGAUUUGCGCG |
| siRNA 1750 | 1750 | GCGCAAAUCCCGCAUCAGC | 4774 | GCUGAUGCGGGAUUUGCGC |
| siRNA 1751 | 1751 | CGCAAAUCCCGCAUCAGCA | 4775 | UGCUGAUGCGGGAUUUGCG |
| siRNA 1752 | 1752 | GCAAAUCCCGCAUCAGCAC | 4776 | GUGCUGAUGCGGGAUUUGC |
| siRNA 1753 | 1753 | CAAAUCCCGCAUCAGCACC | 4777 | GGUGCUGAUGCGGGAUUUG |
| siRNA 1754 | 1754 | AAAUCCCGCAUCAGCACCG | 4778 | CGGUGCUGAUGCGGGAUUU |
| siRNA 1755 | 1755 | AAUCCCGCAUCAGCACCGA | 4779 | UCGGUGCUGAUGCGGGAUU |
| siRNA 1756 | 1756 | AUCCCGCAUCAGCACCGAU | 4780 | AUCGGUGCUGAUGCGGGAU |
| siRNA 1757 | 1757 | UCCCGCAUCAGCACCGAUU | 4781 | AAUCGGUGCUGAUGCGGGA |
| siRNA 1758 | 1758 | CCCGCAUCAGCACCGAUUU | 4782 | AAAUCGGUGCUGAUGCGGG |
| siRNA 1759 | 1759 | CCGCAUCAGCACCGAUUUA | 4783 | UAAAUCGGUGCUGAUGCGG |
| siRNA 1760 | 1760 | CGCAUCAGCACCGAUUUAC | 4784 | GUAAAUCGGUGCUGAUGCG |
| siRNA 1761 | 1761 | GCAUCAGCACCGAUUUACG | 4785 | CGUAAAUCGGUGCUGAUGC |
| siRNA 1762 | 1762 | CAUCAGCACCGAUUUACGC | 4786 | GCGUAAAUCGGUGCUGAUG |
| siRNA 1763 | 1763 | AUCAGCACCGAUUUACGCC | 4787 | GGCGUAAAUCGGUGCUGAU |
| siRNA 1764 | 1764 | UCAGCACCGAUUUACGCCA | 4788 | UGGCGUAAAUCGGUGCUGA |
| siRNA 1765 | 1765 | CAGCACCGAUUUACGCCAG | 4789 | CUGGCGUAAAUCGGUGCUG |
| siRNA 1766 | 1766 | AGCACCGAUUUACGCCAGA | 4790 | UCUGGCGUAAAUCGGUGCU |
| siRNA 1767 | 1767 | GCACCGAUUUACGCCAGAA | 4791 | UUCUGGCGUAAAUCGGUGC |
| siRNA 1768 | 1768 | CACCGAUUUACGCCAGAAA | 4792 | UUUCUGGCGUAAAUCGGUG |
| siRNA 1769 | 1769 | ACCGAUUUACGCCAGAAAA | 4793 | UUUUCUGGCGUAAAUCGGU |
| siRNA 1770 | 1770 | CCGAUUUACGCCAGAAAAA | 4794 | UUUUUCUGGCGUAAAUCGG |
| siRNA 1771 | 1771 | CGAUUUACGCCAGAAAAAU | 4795 | AUUUUUCUGGCGUAAAUCG |
| siRNA 1772 | 1772 | GAUUUACGCCAGAAAAAUA | 4796 | UAUUUUUCUGGCGUAAAUC |
| siRNA 1773 | 1773 | AUUUACGCCAGAAAAAUAC | 4797 | GUAUUUUUCUGGCGUAAAU |
| siRNA 1774 | 1774 | UUUACGCCAGAAAAAUACG | 4798 | CGUAUUUUUCUGGCGUAAA |
| siRNA 1775 | 1775 | UUACGCCAGAAAAAUACGC | 4799 | GCGUAUUUUUCUGGCGUAA |
| siRNA 1776 | 1776 | UACGCCAGAAAAAUACGCG | 4800 | CGCGUAUUUUUCUGGCGUA |
| siRNA 1777 | 1777 | ACGCCAGAAAAAUACGCGU | 4801 | ACGCGUAUUUUUCUGGCGU |
| siRNA 1778 | 1778 | CGCCAGAAAAAUACGCGUG | 4802 | CACGCGUAUUUUUCUGGCG |
| siRNA 1779 | 1779 | GCCAGAAAAAUACGCGUGC | 4803 | GCACGCGUAUUUUUCUGGC |
| siRNA 1780 | 1780 | CCAGAAAAAUACGCGUGCA | 4804 | UGCACGCGUAUUUUUCUGG |
| siRNA 1781 | 1781 | CAGAAAAAUACGCGUGCAA | 4805 | UUGCACGCGUAUUUUUCUG |
| siRNA 1782 | 1782 | AGAAAAAUACGCGUGCAAA | 4806 | UUUGCACGCGUAUUUUUCU |
| siRNA 1783 | 1783 | GAAAAAUACGCGUGCAAAG | 4807 | CUUUGCACGCGUAUUUUUC |
| siRNA 1784 | 1784 | AAAAAUACGCGUGCAAAGA | 4808 | UCUUUGCACGCGUAUUUUU |
| siRNA 1785 | 1785 | AAAAUACGCGUGCAAAGAC | 4809 | GUCUUUGCACGCGUAUUUU |
| siRNA 1786 | 1786 | AAAUACGCGUGCAAAGACC | 4810 | GGUCUUUGCACGCGUAUUU |
| siRNA 1787 | 1787 | AAUACGCGUGCAAAGACCU | 4811 | AGGUCUUUGCACGCGUAUU |
| siRNA 1788 | 1788 | AUACGCGUGCAAAGACCUU | 4812 | AAGGUCUUUGCACGCGUAU |
| siRNA 1789 | 1789 | UACGCGUGCAAAGACCUUC | 4813 | GAAGGUCUUUGCACGCGUA |
| siRNA 1790 | 1790 | ACGCGUGCAAAGACCUUCG | 4814 | CGAAGGUCUUUGCACGCGU |
| siRNA 1791 | 1791 | CGCGUGCAAAGACCUUCGG | 4815 | CCGAAGGUCUUUGCACGCG |
| siRNA 1792 | 1792 | GCGUGCAAAGACCUUCGGG | 4816 | CCCGAAGGUCUUUGCACGC |
| siRNA 1793 | 1793 | CGUGCAAAGACCUUCGGGA | 4817 | UCCCGAAGGUCUUUGCACG |
| siRNA 1794 | 1794 | GUGCAAAGACCUUCGGGAG | 4818 | CUCCCGAAGGUCUUUGCAC |
| siRNA 1795 | 1795 | UGCAAAGACCUUCGGGAGA | 4819 | UCUCCCGAAGGUCUUUGCA |
| siRNA 1796 | 1796 | GCAAAGACCUUCGGGAGAA | 4820 | UUCUCCCGAAGGUCUUUGC |
| siRNA 1797 | 1797 | CAAAGACCUUCGGGAGAAC | 4821 | GUUCUCCCGAAGGUCUUUG |
| siRNA 1798 | 1798 | AAAGACCUUCGGGAGAACU | 4822 | AGUUCUCCCGAAGGUCUUU |
| siRNA 1799 | 1799 | AAGACCUUCGGGAGAACUU | 4823 | AAGUUCUCCCGAAGGUCUU |
| siRNA 1800 | 1800 | AGACCUUCGGGAGAACUUC | 4824 | GAAGUUCUCCCGAAGGUCU |
| siRNA 1801 | 1801 | GACCUUCGGGAGAACUUCU | 4825 | AGAAGUUCUCCCGAAGGUC |
| siRNA 1802 | 1802 | ACCUUCGGGAGAACUUCUG | 4826 | CAGAAGUUCUCCCGAAGGU |
| siRNA 1803 | 1803 | CCUUCGGGAGAACUUCUGC | 4827 | GCAGAAGUUCUCCCGAAGG |
| siRNA 1804 | 1804 | CUUCGGGAGAACUUCUGCC | 4828 | GGCAGAAGUUCUCCCGAAG |
| siRNA 1805 | 1805 | UUCGGGAGAACUUCUGCCG | 4829 | CGGCAGAAGUUCUCCCGAA |
| siRNA 1806 | 1806 | UCGGGAGAACUUCUGCCGG | 4830 | CCGGCAGAAGUUCUCCCGA |
| siRNA 1807 | 1807 | CGGGAGAACUUCUGCCGGA | 4831 | UCCGGCAGAAGUUCUCCCG |
| siRNA 1808 | 1808 | GGGAGAACUUCUGCCGGAA | 4832 | UUCCGGCAGAAGUUCUCCC |
| siRNA 1809 | 1809 | GGAGAACUUCUGCCGGAAC | 4833 | GUUCCGGCAGAAGUUCUCC |
| siRNA 1810 | 1810 | GAGAACUUCUGCCGGAACC | 4834 | GGUUCCGGCAGAAGUUCUC |
| siRNA 1811 | 1811 | AGAACUUCUGCCGGAACCC | 4835 | GGGUUCCGGCAGAAGUUCU |
| siRNA 1812 | 1812 | GAACUUCUGCCGGAACCCC | 4836 | GGGGUUCCGGCAGAAGUUC |
| siRNA 1813 | 1813 | AACUUCUGCCGGAACCCCG | 4837 | CGGGGUUCCGGCAGAAGUU |
| siRNA 1814 | 1814 | ACUUCUGCCGGAACCCCGA | 4838 | UCGGGGUUCCGGCAGAAGU |
| siRNA 1815 | 1815 | CUUCUGCCGGAACCCCGAC | 4839 | GUCGGGGUUCCGGCAGAAG |
| siRNA 1816 | 1816 | UUCUGCCGGAACCCCGACG | 4840 | CGUCGGGGUUCCGGCAGAA |
| siRNA 1817 | 1817 | UCUGCCGGAACCCCGACGG | 4841 | CCGUCGGGGUUCCGGCAGA |
| siRNA 1818 | 1818 | CUGCCGGAACCCCGACGGC | 4842 | GCCGUCGGGGUUCCGGCAG |
| siRNA 1819 | 1819 | UGCCGGAACCCCGACGGCU | 4843 | AGCCGUCGGGGUUCCGGCA |
| siRNA 1820 | 1820 | GCCGGAACCCCGACGGCUC | 4844 | GAGCCGUCGGGGUUCCGGC |
| siRNA 1821 | 1821 | CCGGAACCCCGACGGCUCA | 4845 | UGAGCCGUCGGGGUUCCGG |
| siRNA 1822 | 1822 | CGGAACCCCGACGGCUCAG | 4846 | CUGAGCCGUCGGGGUUCCG |
| siRNA 1823 | 1823 | GGAACCCCGACGGCUCAGA | 4847 | UCUGAGCCGUCGGGGUUCC |
| siRNA 1824 | 1824 | GAACCCCGACGGCUCAGAG | 4848 | CUCUGAGCCGUCGGGGUUC |
| siRNA 1825 | 1825 | AACCCCGACGGCUCAGAGG | 4849 | CCUCUGAGCCGUCGGGGUU |
| siRNA 1826 | 1826 | ACCCCGACGGCUCAGAGGC | 4850 | GCCUCUGAGCCGUCGGGGU |
| siRNA 1827 | 1827 | CCCCGACGGCUCAGAGGCG | 4851 | CGCCUCUGAGCCGUCGGGG |
| siRNA 1828 | 1828 | CCCGACGGCUCAGAGGCGC | 4852 | GCGCCUCUGAGCCGUCGGG |
| siRNA 1829 | 1829 | CCGACGGCUCAGAGGCGCC | 4853 | GGCGCCUCUGAGCCGUCGG |
| siRNA 1830 | 1830 | CGACGGCUCAGAGGCGCCC | 4854 | GGGCGCCUCUGAGCCGUCG |
| SiRNA 1831 | 1831 | GACGGCUCAGAGGCGCCCU | 4855 | AGGGCGCCUCUGAGCCGUC |
| siRNA 1832 | 1832 | ACGGCUCAGAGGCGCCCUG | 4856 | CAGGGCGCCUCUGAGCCGU |
| siRNA 1833 | 1833 | CGGCUCAGAGGCGCCCUGG | 4857 | CCAGGGCGCCUCUGAGCCG |
| siRNA 1834 | 1834 | GGCUCAGAGGCGCCCUGGU | 4858 | ACCAGGGCGCCUCUGAGCC |
| siRNA 1835 | 1835 | GCUCAGAGGCGCCCUGGUG | 4859 | CACCAGGGCGCCUCUGAGC |
| siRNA 1836 | 1836 | CUCAGAGGCGCCCUGGUGC | 4860 | GCACCAGGGCGCCUCUGAG |
| siRNA 1837 | 1837 | UCAGAGGCGCCCUGGUGCU | 4861 | AGCACCAGGGCGCCUCUGA |
| siRNA 1838 | 1838 | CAGAGGCGCCCUGGUGCUU | 4862 | AAGCACCAGGGCGCCUCUG |
| siRNA 1839 | 1839 | AGAGGCGCCCUGGUGCUUC | 4863 | GAAGCACCAGGGCGCCUCU |
| siRNA 1840 | 1840 | GAGGCGCCCUGGUGCUUCA | 4864 | UGAAGCACCAGGGCGCCUC |
| siRNA 1841 | 1841 | AGGCGCCCUGGUGCUUCAC | 4865 | GUGAAGCACCAGGGCGCCU |
| siRNA 1842 | 1842 | GGCGCCCUGGUGCUUCACA | 4866 | UGUGAAGCACCAGGGCGCC |
| siRNA 1843 | 1843 | GCGCCCUGGUGCUUCACAC | 4867 | GUGUGAAGCACCAGGGCGC |
| siRNA 1844 | 1844 | CGCCCUGGUGCUUCACACU | 4868 | AGUGUGAAGCACCAGGGCG |
| siRNA 1845 | 1845 | GCCCUGGUGCUUCACACUG | 4869 | CAGUGUGAAGCACCAGGGC |
| siRNA 1846 | 1846 | CCCUGGUGCUUCACACUGC | 4870 | GCAGUGUGAAGCACCAGGG |
| siRNA 1847 | 1847 | CCUGGUGCUUCACACUGCG | 4871 | CGCAGUGUGAAGCACCAGG |
| siRNA 1848 | 1848 | CUGGUGCUUCACACUGCGG | 4872 | CCGCAGUGUGAAGCACCAG |
| siRNA 1849 | 1849 | UGGUGCUUCACACUGCGGC | 4873 | GCCGCAGUGUGAAGCACCA |
| siRNA 1850 | 1850 | GGUGCUUCACACUGCGGCC | 4874 | GGCCGCAGUGUGAAGCACC |
| siRNA 1851 | 1851 | GUGCUUCACACUGCGGCCC | 4875 | GGGCCGCAGUGUGAAGCAC |
| siRNA 1852 | 1852 | UGCUUCACACUGCGGCCCG | 4876 | CGGGCCGCAGUGUGAAGCA |
| siRNA 1853 | 1853 | GCUUCACACUGCGGCCCGG | 4877 | CCGGGCCGCAGUGUGAAGC |
| siRNA 1854 | 1854 | CUUCACACUGCGGCCCGGC | 4878 | GCCGGGCCGCAGUGUGAAG |
| siRNA 1855 | 1855 | UUCACACUGCGGCCCGGCA | 4879 | UGCCGGGCCGCAGUGUGAA |
| siRNA 1856 | 1856 | UCACACUGCGGCCCGGCAU | 4880 | AUGCCGGGCCGCAGUGUGA |
| siRNA 1857 | 1857 | CACACUGCGGCCCGGCAUG | 4881 | CAUGCCGGGCCGCAGUGUG |
| siRNA 1858 | 1858 | ACACUGCGGCCCGGCAUGC | 4882 | GCAUGCCGGGCCGCAGUGU |
| siRNA 1859 | 1859 | CACUGCGGCCCGGCAUGCG | 4883 | CGCAUGCCGGGCCGCAGUG |
| siRNA 1860 | 1860 | ACUGCGGCCCGGCAUGCGC | 4884 | GCGCAUGCCGGGCCGCAGU |
| siRNA 1861 | 1861 | CUGCGGCCCGGCAUGCGCG | 4885 | CGCGCAUGCCGGGCCGCAG |
| siRNA 1862 | 1862 | UGCGGCCCGGCAUGCGCGC | 4886 | GCGCGCAUGCCGGGCCGCA |
| siRNA 1863 | 1863 | GCGGCCCGGCAUGCGCGCG | 4887 | CGCGCGCAUGCCGGGCCGC |
| siRNA 1864 | 1864 | CGGCCCGGCAUGCGCGCGG | 4888 | CCGCGCGCAUGCCGGGCCG |
| siRNA 1865 | 1865 | GGCCCGGCAUGCGCGCGGC | 4889 | GCCGCGCGCAUGCCGGGCC |
| siRNA 1866 | 1866 | GCCCGGCAUGCGCGCGGCC | 4890 | GGCCGCGCGCAUGCCGGGC |
| siRNA 1867 | 1867 | CCCGGCAUGCGCGCGGCCU | 4891 | AGGCCGCGCGCAUGCCGGG |
| siRNA 1868 | 1868 | CCGGCAUGCGCGCGGCCUU | 4892 | AAGGCCGCGCGCAUGCCGG |
| siRNA 1869 | 1869 | CGGCAUGCGCGCGGCCUUU | 4893 | AAAGGCCGCGCGCAUGCCG |
| siRNA 1870 | 1870 | GGCAUGCGCGCGGCCUUUU | 4894 | AAAAGGCCGCGCGCAUGCC |
| siRNA 1871 | 1871 | GCAUGCGCGCGGCCUUUUG | 4895 | CAAAAGGCCGCGCGCAUGC |
| siRNA 1872 | 1872 | CAUGCGCGCGGCCUUUUGC | 4896 | GCAAAAGGCCGCGCGCAUG |
| siRNA 1873 | 1873 | AUGCGCGCGGCCUUUUGCU | 4897 | AGCAAAAGGCCGCGCGCAU |
| siRNA 1874 | 1874 | UGCGCGCGGCCUUUUGCUA | 4898 | UAGCAAAAGGCCGCGCGCA |
| siRNA 1875 | 1875 | GCGCGCGGCCUUUUGCUAC | 4899 | GUAGCAAAAGGCCGCGCGC |
| siRNA 1876 | 1876 | CGCGCGGCCUUUUGCUACC | 4900 | GGUAGCAAAAGGCCGCGCG |
| siRNA 1877 | 1877 | GCGCGGCCUUUUGCUACCA | 4901 | UGGUAGCAAAAGGCCGCGC |
| siRNA 1878 | 1878 | CGCGGCCUUUUGCUACCAG | 4902 | CUGGUAGCAAAAGGCCGCG |
| siRNA 1879 | 1879 | GCGGCCUUUUGCUACCAGA | 4903 | UCUGGUAGCAAAAGGCCGC |
| siRNA 1880 | 1880 | CGGCCUUUUGCUACCAGAU | 4904 | AUCUGGUAGCAAAAGGCCG |
| siRNA 1881 | 1881 | GGCCUUUUGCUACCAGAUC | 4905 | GAUCUGGUAGCAAAAGGCC |
| siRNA 1882 | 1882 | GCCUUUUGCUACCAGAUCC | 4906 | GGAUCUGGUAGCAAAAGGC |
| SiRNA 1883 | 1883 | CCUUUUGCUACCAGAUCCG | 4907 | CGGAUCUGGUAGCAAAAGG |
| siRNA 1884 | 1884 | CUUUUGCUACCAGAUCCGG | 4908 | CCGGAUCUGGUAGCAAAAG |
| siRNA 1885 | 1885 | UUUUGCUACCAGAUCCGGC | 4909 | GCCGGAUCUGGUAGCAAAA |
| siRNA 1886 | 1886 | UUUGCUACCAGAUCCGGCG | 4910 | CGCCGGAUCUGGUAGCAAA |
| siRNA 1887 | 1887 | UUGCUACCAGAUCCGGCGU | 4911 | ACGCCGGAUCUGGUAGCAA |
| siRNA 1888 | 1888 | UGCUACCAGAUCCGGCGUU | 4912 | AACGCCGGAUCUGGUAGCA |
| siRNA 1889 | 1889 | GCUACCAGAUCCGGCGUUG | 4913 | CAACGCCGGAUCUGGUAGC |
| siRNA 1890 | 1890 | CUACCAGAUCCGGCGUUGU | 4914 | ACAACGCCGGAUCUGGUAG |
| siRNA 1891 | 1891 | UACCAGAUCCGGCGUUGUA | 4915 | UACAACGCCGGAUCUGGUA |
| siRNA 1892 | 1892 | ACCAGAUCCGGCGUUGUAC | 4916 | GUACAACGCCGGAUCUGGU |
| siRNA 1893 | 1893 | CCAGAUCCGGCGUUGUACA | 4917 | UGUACAACGCCGGAUCUGG |
| siRNA 1894 | 1894 | CAGAUCCGGCGUUGUACAG | 4918 | CUGUACAACGCCGGAUCUG |
| siRNA 1895 | 1895 | AGAUCCGGCGUUGUACAGA | 4919 | UCUGUACAACGCCGGAUCU |
| siRNA 1896 | 1896 | GAUCCGGCGUUGUACAGAC | 4920 | GUCUGUACAACGCCGGAUC |
| siRNA 1897 | 1897 | AUCCGGCGUUGUACAGACG | 4921 | CGUCUGUACAACGCCGGAU |
| siRNA 1898 | 1898 | UCCGGCGUUGUACAGACGA | 4922 | UCGUCUGUACAACGCCGGA |
| siRNA 1899 | 1899 | CCGGCGUUGUACAGACGAC | 4923 | GUCGUCUGUACAACGCCGG |
| siRNA 1900 | 1900 | CGGCGUUGUACAGACGACG | 4924 | CGUCGUCUGUACAACGCCG |
| siRNA 1901 | 1901 | GGCGUUGUACAGACGACGU | 4925 | ACGUCGUCUGUACAACGCC |
| siRNA 1902 | 1902 | GCGUUGUACAGACGACGUG | 4926 | CACGUCGUCUGUACAACGC |
| SiRNA 1903 | 1903 | CGUUGUACAGACGACGUGC | 4927 | GCACGUCGUCUGUACAACG |
| siRNA 1904 | 1904 | GUUGUACAGACGACGUGCG | 4928 | CGCACGUCGUCUGUACAAC |
| siRNA 1905 | 1905 | UUGUACAGACGACGUGCGG | 4929 | CCGCACGUCGUCUGUACAA |
| siRNA 1906 | 1906 | UGUACAGACGACGUGCGGC | 4930 | GCCGCACGUCGUCUGUACA |
| siRNA 1907 | 1907 | GUACAGACGACGUGCGGCC | 4931 | GGCCGCACGUCGUCUGUAC |
| siRNA 1908 | 1908 | UACAGACGACGUGCGGCCC | 4932 | GGGCCGCACGUCGUCUGUA |
| siRNA 1909 | 1909 | ACAGACGACGUGCGGCCCC | 4933 | GGGGCCGCACGUCGUCUGU |
| siRNA 1910 | 1910 | CAGACGACGUGCGGCCCCA | 4934 | UGGGGCCGCACGUCGUCUG |
| siRNA 1911 | 1911 | AGACGACGUGCGGCCCCAG | 4935 | CUGGGGCCGCACGUCGUCU |
| siRNA 1912 | 1912 | GACGACGUGCGGCCCCAGG | 4936 | CCUGGGGCCGCACGUCGUC |
| siRNA 1913 | 1913 | ACGACGUGCGGCCCCAGGA | 4937 | UCCUGGGGCCGCACGUCGU |
| siRNA 1914 | 1914 | CGACGUGCGGCCCCAGGAC | 4938 | GUCCUGGGGCCGCACGUCG |
| siRNA 1915 | 1915 | GACGUGCGGCCCCAGGACU | 4939 | AGUCCUGGGGCCGCACGUC |
| siRNA 1916 | 1916 | ACGUGCGGCCCCAGGACUG | 4940 | CAGUCCUGGGGCCGCACGU |
| siRNA 1917 | 1917 | CGUGCGGCCCCAGGACUGC | 4941 | GCAGUCCUGGGGCCGCACG |
| siRNA 1918 | 1918 | GUGCGGCCCCAGGACUGCU | 4942 | AGCAGUCCUGGGGCCGCAC |
| siRNA 1919 | 1919 | UGCGGCCCCAGGACUGCUA | 4943 | UAGCAGUCCUGGGGCCGCA |
| siRNA 1920 | 1920 | GCGGCCCCAGGACUGCUAC | 4944 | GUAGCAGUCCUGGGGCCGC |
| siRNA 1921 | 1921 | CGGCCCCAGGACUGCUACC | 4945 | GGUAGCAGUCCUGGGGCCG |
| siRNA 1922 | 1922 | GGCCCCAGGACUGCUACCA | 4946 | UGGUAGCAGUCCUGGGGCC |
| siRNA 1923 | 1923 | GCCCCAGGACUGCUACCAC | 4947 | GUGGUAGCAGUCCUGGGGC |
| siRNA 1924 | 1924 | CCCCAGGACUGCUACCACG | 4948 | CGUGGUAGCAGUCCUGGGG |
| siRNA 1925 | 1925 | CCCAGGACUGCUACCACGG | 4949 | CCGUGGUAGCAGUCCUGGG |
| siRNA 1926 | 1926 | CCAGGACUGCUACCACGGC | 4950 | GCCGUGGUAGCAGUCCUGG |
| siRNA 1927 | 1927 | CAGGACUGCUACCACGGCG | 4951 | CGCCGUGGUAGCAGUCCUG |
| siRNA 1928 | 1928 | AGGACUGCUACCACGGCGC | 4952 | GCGCCGUGGUAGCAGUCCU |
| siRNA 1929 | 1929 | GGACUGCUACCACGGCGCA | 4953 | UGCGCCGUGGUAGCAGUCC |
| siRNA 1930 | 1930 | GACUGCUACCACGGCGCAG | 4954 | CUGCGCCGUGGUAGCAGUC |
| siRNA 1931 | 1931 | ACUGCUACCACGGCGCAGG | 4955 | CCUGCGCCGUGGUAGCAGU |
| siRNA 1932 | 1932 | CUGCUACCACGGCGCAGGG | 4956 | CCCUGCGCCGUGGUAGCAG |
| siRNA 1933 | 1933 | UGCUACCACGGCGCAGGGG | 4957 | CCCCUGCGCCGUGGUAGCA |
| siRNA 1934 | 1934 | GCUACCACGGCGCAGGGGA | 4958 | UCCCCUGCGCCGUGGUAGC |
| siRNA 1935 | 1935 | CUACCACGGCGCAGGGGAG | 4959 | CUCCCCUGCGCCGUGGUAG |
| siRNA 1936 | 1936 | UACCACGGCGCAGGGGAGC | 4960 | GCUCCCCUGCGCCGUGGUA |
| siRNA 1937 | 1937 | ACCACGGCGCAGGGGAGCA | 4961 | UGCUCCCCUGCGCCGUGGU |
| siRNA 1938 | 1938 | CCACGGCGCAGGGGAGCAG | 4962 | CUGCUCCCCUGCGCCGUGG |
| siRNA 1939 | 1939 | CACGGCGCAGGGGAGCAGU | 4963 | ACUGCUCCCCUGCGCCGUG |
| siRNA 1940 | 1940 | ACGGCGCAGGGGAGCAGUA | 4964 | UACUGCUCCCCUGCGCCGU |
| siRNA 1941 | 1941 | CGGCGCAGGGGAGCAGUAC | 4965 | GUACUGCUCCCCUGCGCCG |
| siRNA 1942 | 1942 | GGCGCAGGGGAGCAGUACC | 4966 | GGUACUGCUCCCCUGCGCC |
| siRNA 1943 | 1943 | GCGCAGGGGAGCAGUACCG | 4967 | CGGUACUGCUCCCCUGCGC |
| siRNA 1944 | 1944 | CGCAGGGGAGCAGUACCGC | 4968 | GCGGUACUGCUCCCCUGCG |
| siRNA 1945 | 1945 | GCAGGGGAGCAGUACCGCG | 4969 | CGCGGUACUGCUCCCCUGC |
| siRNA 1946 | 1946 | CAGGGGAGCAGUACCGCGG | 4970 | CCGCGGUACUGCUCCCCUG |
| siRNA 1947 | 1947 | AGGGGAGCAGUACCGCGGC | 4971 | GCCGCGGUACUGCUCCCCU |
| siRNA 1948 | 1948 | GGGGAGCAGUACCGCGGCA | 4972 | UGCCGCGGUACUGCUCCCC |
| siRNA 1949 | 1949 | GGGAGCAGUACCGCGGCAC | 4973 | GUGCCGCGGUACUGCUCCC |
| siRNA 1950 | 1950 | GGAGCAGUACCGCGGCACG | 4974 | CGUGCCGCGGUACUGCUCC |
| siRNA 1951 | 1951 | GAGCAGUACCGCGGCACGG | 4975 | CCGUGCCGCGGUACUGCUC |
| siRNA 1952 | 1952 | AGCAGUACCGCGGCACGGU | 4976 | ACCGUGCCGCGGUACUGCU |
| siRNA 1953 | 1953 | GCAGUACCGCGGCACGGUC | 4977 | GACCGUGCCGCGGUACUGC |
| siRNA 1954 | 1954 | CAGUACCGCGGCACGGUCA | 4978 | UGACCGUGCCGCGGUACUG |
| siRNA 1955 | 1955 | AGUACCGCGGCACGGUCAG | 4979 | CUGACCGUGCCGCGGUACU |
| siRNA 1956 | 1956 | GUACCGCGGCACGGUCAGC | 4980 | GCUGACCGUGCCGCGGUAC |
| siRNA 1957 | 1957 | UACCGCGGCACGGUCAGCA | 4981 | UGCUGACCGUGCCGCGGUA |
| siRNA 1958 | 1958 | ACCGCGGCACGGUCAGCAA | 4982 | UUGCUGACCGUGCCGCGGU |
| siRNA 1959 | 1959 | CCGCGGCACGGUCAGCAAG | 4983 | CUUGCUGACCGUGCCGCGG |
| siRNA 1960 | 1960 | CGCGGCACGGUCAGCAAGA | 4984 | UCUUGCUGACCGUGCCGCG |
| siRNA 1961 | 1961 | GCGGCACGGUCAGCAAGAC | 4985 | GUCUUGCUGACCGUGCCGC |
| siRNA 1962 | 1962 | CGGCACGGUCAGCAAGACC | 4986 | GGUCUUGCUGACCGUGCCG |
| siRNA 1963 | 1963 | GGCACGGUCAGCAAGACCC | 4987 | GGGUCUUGCUGACCGUGCC |
| siRNA 1964 | 1964 | GCACGGUCAGCAAGACCCG | 4988 | CGGGUCUUGCUGACCGUGC |
| siRNA 1965 | 1965 | CACGGUCAGCAAGACCCGC | 4989 | GCGGGUCUUGCUGACCGUG |
| siRNA 1966 | 1966 | ACGGUCAGCAAGACCCGCA | 4990 | UGCGGGUCUUGCUGACCGU |
| siRNA 1967 | 1967 | CGGUCAGCAAGACCCGCAA | 4991 | UUGCGGGUCUUGCUGACCG |
| siRNA 1968 | 1968 | GGUCAGCAAGACCCGCAAG | 4992 | CUUGCGGGUCUUGCUGACC |
| siRNA 1969 | 1969 | GUCAGCAAGACCCGCAAGG | 4993 | CCUUGCGGGUCUUGCUGAC |
| siRNA 1970 | 1970 | UCAGCAAGACCCGCAAGGG | 4994 | CCCUUGCGGGUCUUGCUGA |
| siRNA 1971 | 1971 | CAGCAAGACCCGCAAGGGU | 4995 | ACCCUUGCGGGUCUUGCUG |
| siRNA 1972 | 1972 | AGCAAGACCCGCAAGGGUG | 4996 | CACCCUUGCGGGUCUUGCU |
| siRNA 1973 | 1973 | GCAAGACCCGCAAGGGUGU | 4997 | ACACCCUUGCGGGUCUUGC |
| siRNA 1974 | 1974 | CAAGACCCGCAAGGGUGUC | 4998 | GACACCCUUGCGGGUCUUG |
| siRNA 1975 | 1975 | AAGACCCGCAAGGGUGUCC | 4999 | GGACACCCUUGCGGGUCUU |
| siRNA 1976 | 1976 | AGACCCGCAAGGGUGUCCA | 5000 | UGGACACCCUUGCGGGUCU |
| siRNA 1977 | 1977 | GACCCGCAAGGGUGUCCAG | 5001 | CUGGACACCCUUGCGGGUC |
| siRNA 1978 | 1978 | ACCCGCAAGGGUGUCCAGU | 5002 | ACUGGACACCCUUGCGGGU |
| siRNA 1979 | 1979 | CCCGCAAGGGUGUCCAGUG | 5003 | CACUGGACACCCUUGCGGG |
| siRNA 1980 | 1980 | CCGCAAGGGUGUCCAGUGC | 5004 | GCACUGGACACCCUUGCGG |
| siRNA 1981 | 1981 | CGCAAGGGUGUCCAGUGCC | 5005 | GGCACUGGACACCCUUGCG |
| siRNA 1982 | 1982 | GCAAGGGUGUCCAGUGCCA | 5006 | UGGCACUGGACACCCUUGC |
| siRNA 1983 | 1983 | CAAGGGUGUCCAGUGCCAG | 5007 | CUGGCACUGGACACCCUUG |
| siRNA 1984 | 1984 | AAGGGUGUCCAGUGCCAGC | 5008 | GCUGGCACUGGACACCCUU |
| siRNA 1985 | 1985 | AGGGUGUCCAGUGCCAGCG | 5009 | CGCUGGCACUGGACACCCU |
| siRNA 1986 | 1986 | GGGUGUCCAGUGCCAGCGC | 5010 | GCGCUGGCACUGGACACCC |
| siRNA 1987 | 1987 | GGUGUCCAGUGCCAGCGCU | 5011 | AGCGCUGGCACUGGACACC |
| siRNA 1988 | 1988 | GUGUCCAGUGCCAGCGCUG | 5012 | CAGCGCUGGCACUGGACAC |
| siRNA 1989 | 1989 | UGUCCAGUGCCAGCGCUGG | 5013 | CCAGCGCUGGCACUGGACA |
| siRNA 1990 | 1990 | GUCCAGUGCCAGCGCUGGU | 5014 | ACCAGCGCUGGCACUGGAC |
| siRNA 1991 | 1991 | UCCAGUGCCAGCGCUGGUC | 5015 | GACCAGCGCUGGCACUGGA |
| siRNA 1992 | 1992 | CCAGUGCCAGCGCUGGUCC | 5016 | GGACCAGCGCUGGCACUGG |
| siRNA 1993 | 1993 | CAGUGCCAGCGCUGGUCCG | 5017 | CGGACCAGCGCUGGCACUG |
| siRNA 1994 | 1994 | AGUGCCAGCGCUGGUCCGC | 5018 | GCGGACCAGCGCUGGCACU |
| siRNA 1995 | 1995 | GUGCCAGCGCUGGUCCGCU | 5019 | AGCGGACCAGCGCUGGCAC |
| siRNA 1996 | 1996 | UGCCAGCGCUGGUCCGCUG | 5020 | CAGCGGACCAGCGCUGGCA |
| siRNA 1997 | 1997 | GCCAGCGCUGGUCCGCUGA | 5021 | UCAGCGGACCAGCGCUGGC |
| siRNA 1998 | 1998 | CCAGCGCUGGUCCGCUGAG | 5022 | CUCAGCGGACCAGCGCUGG |
| siRNA 1999 | 1999 | CAGCGCUGGUCCGCUGAGA | 5023 | UCUCAGCGGACCAGCGCUG |
| siRNA 2000 | 2000 | AGCGCUGGUCCGCUGAGAC | 5024 | GUCUCAGCGGACCAGCGCU |
| siRNA 2001 | 2001 | GCGCUGGUCCGCUGAGACG | 5025 | CGUCUCAGCGGACCAGCGC |
| siRNA 2002 | 2002 | CGCUGGUCCGCUGAGACGC | 5026 | GCGUCUCAGCGGACCAGCG |
| siRNA 2003 | 2003 | GCUGGUCCGCUGAGACGCC | 5027 | GGCGUCUCAGCGGACCAGC |
| siRNA 2004 | 2004 | CUGGUCCGCUGAGACGCCG | 5028 | CGGCGUCUCAGCGGACCAG |
| siRNA 2005 | 2005 | UGGUCCGCUGAGACGCCGC | 5029 | GCGGCGUCUCAGCGGACCA |
| siRNA 2006 | 2006 | GGUCCGCUGAGACGCCGCA | 5030 | UGCGGCGUCUCAGCGGACC |
| siRNA 2007 | 2007 | GUCCGCUGAGACGCCGCAC | 5031 | GUGCGGCGUCUCAGCGGAC |
| siRNA 2008 | 2008 | UCCGCUGAGACGCCGCACA | 5032 | UGUGCGGCGUCUCAGCGGA |
| siRNA 2009 | 2009 | CCGCUGAGACGCCGCACAA | 5033 | UUGUGCGGCGUCUCAGCGG |
| siRNA 2010 | 2010 | CGCUGAGACGCCGCACAAG | 5034 | CUUGUGCGGCGUCUCAGCG |
| siRNA 2011 | 2011 | GCUGAGACGCCGCACAAGC | 5035 | GCUUGUGCGGCGUCUCAGC |
| siRNA 2012 | 2012 | CUGAGACGCCGCACAAGCC | 5036 | GGCUUGUGCGGCGUCUCAG |
| siRNA 2013 | 2013 | UGAGACGCCGCACAAGCCG | 5037 | CGGCUUGUGCGGCGUCUCA |
| siRNA 2014 | 2014 | GAGACGCCGCACAAGCCGC | 5038 | GCGGCUUGUGCGGCGUCUC |
| siRNA 2015 | 2015 | AGACGCCGCACAAGCCGCA | 5039 | UGCGGCUUGUGCGGCGUCU |
| siRNA 2016 | 2016 | GACGCCGCACAAGCCGCAG | 5040 | CUGCGGCUUGUGCGGCGUC |
| siRNA 2017 | 2017 | ACGCCGCACAAGCCGCAGU | 5041 | ACUGCGGCUUGUGCGGCGU |
| siRNA 2018 | 2018 | CGCCGCACAAGCCGCAGUU | 5042 | AACUGCGGCUUGUGCGGCG |
| siRNA 2019 | 2019 | GCCGCACAAGCCGCAGUUC | 5043 | GAACUGCGGCUUGUGCGGC |
| siRNA 2020 | 2020 | CCGCACAAGCCGCAGUUCA | 5044 | UGAACUGCGGCUUGUGCGG |
| siRNA 2021 | 2021 | CGCACAAGCCGCAGUUCAC | 5045 | GUGAACUGCGGCUUGUGCG |
| siRNA 2022 | 2022 | GCACAAGCCGCAGUUCACG | 5046 | CGUGAACUGCGGCUUGUGC |
| siRNA 2023 | 2023 | CACAAGCCGCAGUUCACGU | 5047 | ACGUGAACUGCGGCUUGUG |
| siRNA 2024 | 2024 | ACAAGCCGCAGUUCACGUU | 5048 | AACGUGAACUGCGGCUUGU |
| siRNA 2025 | 2025 | CAAGCCGCAGUUCACGUUU | 5049 | AAACGUGAACUGCGGCUUG |
| siRNA 2026 | 2026 | AAGCCGCAGUUCACGUUUA | 5050 | UAAACGUGAACUGCGGCUU |
| siRNA 2027 | 2027 | AGCCGCAGUUCACGUUUAC | 5051 | GUAAACGUGAACUGCGGCU |
| siRNA 2028 | 2028 | GCCGCAGUUCACGUUUACC | 5052 | GGUAAACGUGAACUGCGGC |
| siRNA 2029 | 2029 | CCGCAGUUCACGUUUACCU | 5053 | AGGUAAACGUGAACUGCGG |
| siRNA 2030 | 2030 | CGCAGUUCACGUUUACCUC | 5054 | GAGGUAAACGUGAACUGCG |
| siRNA 2031 | 2031 | GCAGUUCACGUUUACCUCC | 5055 | GGAGGUAAACGUGAACUGC |
| siRNA 2032 | 2032 | CAGUUCACGUUUACCUCCG | 5056 | CGGAGGUAAACGUGAACUG |
| siRNA 2033 | 2033 | AGUUCACGUUUACCUCCGA | 5057 | UCGGAGGUAAACGUGAACU |
| siRNA 2034 | 2034 | GUUCACGUUUACCUCCGAA | 5058 | UUCGGAGGUAAACGUGAAC |
| siRNA 2035 | 2035 | UUCACGUUUACCUCCGAAC | 5059 | GUUCGGAGGUAAACGUGAA |
| siRNA 2036 | 2036 | UCACGUUUACCUCCGAACC | 5060 | GGUUCGGAGGUAAACGUGA |
| siRNA 2037 | 2037 | CACGUUUACCUCCGAACCG | 5061 | CGGUUCGGAGGUAAACGUG |
| siRNA 2038 | 2038 | ACGUUUACCUCCGAACCGC | 5062 | GCGGUUCGGAGGUAAACGU |
| siRNA 2039 | 2039 | CGUUUACCUCCGAACCGCA | 5063 | UGCGGUUCGGAGGUAAACG |
| siRNA 2040 | 2040 | GUUUACCUCCGAACCGCAU | 5064 | AUGCGGUUCGGAGGUAAAC |
| siRNA 2041 | 2041 | UUUACCUCCGAACCGCAUG | 5065 | CAUGCGGUUCGGAGGUAAA |
| siRNA 2042 | 2042 | UUACCUCCGAACCGCAUGC | 5066 | GCAUGCGGUUCGGAGGUAA |
| siRNA 2043 | 2043 | UACCUCCGAACCGCAUGCA | 5067 | UGCAUGCGGUUCGGAGGUA |
| siRNA 2044 | 2044 | ACCUCCGAACCGCAUGCAC | 5068 | GUGCAUGCGGUUCGGAGGU |
| siRNA 2045 | 2045 | CCUCCGAACCGCAUGCACA | 5069 | UGUGCAUGCGGUUCGGAGG |
| siRNA 2046 | 2046 | CUCCGAACCGCAUGCACAA | 5070 | UUGUGCAUGCGGUUCGGAG |
| siRNA 2047 | 2047 | UCCGAACCGCAUGCACAAC | 5071 | GUUGUGCAUGCGGUUCGGA |
| siRNA 2048 | 2048 | CCGAACCGCAUGCACAACU | 5072 | AGUUGUGCAUGCGGUUCGG |
| siRNA 2049 | 2049 | CGAACCGCAUGCACAACUG | 5073 | CAGUUGUGCAUGCGGUUCG |
| siRNA 2050 | 2050 | GAACCGCAUGCACAACUGG | 5074 | CCAGUUGUGCAUGCGGUUC |
| siRNA 2051 | 2051 | AACCGCAUGCACAACUGGA | 5075 | UCCAGUUGUGCAUGCGGUU |
| siRNA 2052 | 2052 | ACCGCAUGCACAACUGGAG | 5076 | CUCCAGUUGUGCAUGCGGU |
| siRNA 2053 | 2053 | CCGCAUGCACAACUGGAGG | 5077 | CCUCCAGUUGUGCAUGCGG |
| siRNA 2054 | 2054 | CGCAUGCACAACUGGAGGA | 5078 | UCCUCCAGUUGUGCAUGCG |
| siRNA 2055 | 2055 | GCAUGCACAACUGGAGGAG | 5079 | CUCCUCCAGUUGUGCAUGC |
| siRNA 2056 | 2056 | CAUGCACAACUGGAGGAGA | 5080 | UCUCCUCCAGUUGUGCAUG |
| siRNA 2057 | 2057 | AUGCACAACUGGAGGAGAA | 5081 | UUCUCCUCCAGUUGUGCAU |
| siRNA 2058 | 2058 | UGCACAACUGGAGGAGAAC | 5082 | GUUCUCCUCCAGUUGUGCA |
| siRNA 2059 | 2059 | GCACAACUGGAGGAGAACU | 5083 | AGUUCUCCUCCAGUUGUGC |
| siRNA 2060 | 2060 | CACAACUGGAGGAGAACUU | 5084 | AAGUUCUCCUCCAGUUGUG |
| siRNA 2061 | 2061 | ACAACUGGAGGAGAACUUC | 5085 | GAAGUUCUCCUCCAGUUGU |
| siRNA 2062 | 2062 | CAACUGGAGGAGAACUUCU | 5086 | AGAAGUUCUCCUCCAGUUG |
| siRNA 2063 | 2063 | AACUGGAGGAGAACUUCUG | 5087 | CAGAAGUUCUCCUCCAGUU |
| siRNA 2064 | 2064 | ACUGGAGGAGAACUUCUGC | 5088 | GCAGAAGUUCUCCUCCAGU |
| siRNA 2065 | 2065 | CUGGAGGAGAACUUCUGCC | 5089 | GGCAGAAGUUCUCCUCCAG |
| siRNA 2066 | 2066 | UGGAGGAGAACUUCUGCCG | 5090 | CGGCAGAAGUUCUCCUCCA |
| siRNA 2067 | 2067 | GGAGGAGAACUUCUGCCGG | 5091 | CCGGCAGAAGUUCUCCUCC |
| siRNA 2068 | 2068 | GAGGAGAACUUCUGCCGGA | 5092 | UCCGGCAGAAGUUCUCCUC |
| siRNA 2069 | 2069 | AGGAGAACUUCUGCCGGAA | 5093 | UUCCGGCAGAAGUUCUCCU |
| siRNA 2070 | 2070 | GGAGAACUUCUGCCGGAAC | 5094 | GUUCCGGCAGAAGUUCUCC |
| siRNA 2071 | 2071 | GAGAACUUCUGCCGGAACC | 5095 | GGUUCCGGCAGAAGUUCUC |
| siRNA 2072 | 2072 | AGAACUUCUGCCGGAACCC | 5096 | GGGUUCCGGCAGAAGUUCU |
| siRNA 2073 | 2073 | GAACUUCUGCCGGAACCCA | 5097 | UGGGUUCCGGCAGAAGUUC |
| siRNA 2074 | 2074 | AACUUCUGCCGGAACCCAG | 5098 | CUGGGUUCCGGCAGAAGUU |
| siRNA 2075 | 2075 | ACUUCUGCCGGAACCCAGA | 5099 | UCUGGGUUCCGGCAGAAGU |
| siRNA 2076 | 2076 | CUUCUGCCGGAACCCAGAU | 5100 | AUCUGGGUUCCGGCAGAAG |
| siRNA 2077 | 2077 | UUCUGCCGGAACCCAGAUG | 5101 | CAUCUGGGUUCCGGCAGAA |
| siRNA 2078 | 2078 | UCUGCCGGAACCCAGAUGG | 5102 | CCAUCUGGGUUCCGGCAGA |
| siRNA 2079 | 2079 | CUGCCGGAACCCAGAUGGG | 5103 | CCCAUCUGGGUUCCGGCAG |
| siRNA 2080 | 2080 | UGCCGGAACCCAGAUGGGG | 5104 | CCCCAUCUGGGUUCCGGCA |
| siRNA 2081 | 2081 | GCCGGAACCCAGAUGGGGA | 5105 | UCCCCAUCUGGGUUCCGGC |
| siRNA 2082 | 2082 | CCGGAACCCAGAUGGGGAU | 5106 | AUCCCCAUCUGGGUUCCGG |
| siRNA 2083 | 2083 | CGGAACCCAGAUGGGGAUA | 5107 | UAUCCCCAUCUGGGUUCCG |
| siRNA 2084 | 2084 | GGAACCCAGAUGGGGAUAG | 5108 | CUAUCCCCAUCUGGGUUCC |
| siRNA 2085 | 2085 | GAACCCAGAUGGGGAUAGC | 5109 | GCUAUCCCCAUCUGGGUUC |
| siRNA 2086 | 2086 | AACCCAGAUGGGGAUAGCC | 5110 | GGCUAUCCCCAUCUGGGUU |
| siRNA 2087 | 2087 | ACCCAGAUGGGGAUAGCCA | 5111 | UGGCUAUCCCCAUCUGGGU |
| siRNA 2088 | 2088 | CCCAGAUGGGGAUAGCCAU | 5112 | AUGGCUAUCCCCAUCUGGG |
| siRNA 2089 | 2089 | CCAGAUGGGGAUAGCCAUG | 5113 | CAUGGCUAUCCCCAUCUGG |
| siRNA 2090 | 2090 | CAGAUGGGGAUAGCCAUGG | 5114 | CCAUGGCUAUCCCCAUCUG |
| siRNA 2091 | 2091 | AGAUGGGGAUAGCCAUGGG | 5115 | CCCAUGGCUAUCCCCAUCU |
| siRNA 2092 | 2092 | GAUGGGGAUAGCCAUGGGC | 5116 | GCCCAUGGCUAUCCCCAUC |
| siRNA 2093 | 2093 | AUGGGGAUAGCCAUGGGCC | 5117 | GGCCCAUGGCUAUCCCCAU |
| siRNA 2094 | 2094 | UGGGGAUAGCCAUGGGCCC | 5118 | GGGCCCAUGGCUAUCCCCA |
| siRNA 2095 | 2095 | GGGGAUAGCCAUGGGCCCU | 5119 | AGGGCCCAUGGCUAUCCCC |
| siRNA 2096 | 2096 | GGGAUAGCCAUGGGCCCUG | 5120 | CAGGGCCCAUGGCUAUCCC |
| siRNA 2097 | 2097 | GGAUAGCCAUGGGCCCUGG | 5121 | CCAGGGCCCAUGGCUAUCC |
| siRNA 2098 | 2098 | GAUAGCCAUGGGCCCUGGU | 5122 | ACCAGGGCCCAUGGCUAUC |
| siRNA 2099 | 2099 | AUAGCCAUGGGCCCUGGUG | 5123 | CACCAGGGCCCAUGGCUAU |
| siRNA 2100 | 2100 | UAGCCAUGGGCCCUGGUGC | 5124 | GCACCAGGGCCCAUGGCUA |
| siRNA 2101 | 2101 | AGCCAUGGGCCCUGGUGCU | 5125 | AGCACCAGGGCCCAUGGCU |
| siRNA 2102 | 2102 | GCCAUGGGCCCUGGUGCUA | 5126 | UAGCACCAGGGCCCAUGGC |
| siRNA 2103 | 2103 | CCAUGGGCCCUGGUGCUAC | 5127 | GUAGCACCAGGGCCCAUGG |
| siRNA 2104 | 2104 | CAUGGGCCCUGGUGCUACA | 5128 | UGUAGCACCAGGGCCCAUG |
| siRNA 2105 | 2105 | AUGGGCCCUGGUGCUACAC | 5129 | GUGUAGCACCAGGGCCCAU |
| siRNA 2106 | 2106 | UGGGCCCUGGUGCUACACG | 5130 | CGUGUAGCACCAGGGCCCA |
| siRNA 2107 | 2107 | GGGCCCUGGUGCUACACGA | 5131 | UCGUGUAGCACCAGGGCCC |
| siRNA 2108 | 2108 | GGCCCUGGUGCUACACGAU | 5132 | AUCGUGUAGCACCAGGGCC |
| siRNA 2109 | 2109 | GCCCUGGUGCUACACGAUG | 5133 | CAUCGUGUAGCACCAGGGC |
| siRNA 2110 | 2110 | CCCUGGUGCUACACGAUGG | 5134 | CCAUCGUGUAGCACCAGGG |
| siRNA 2111 | 2111 | CCUGGUGCUACACGAUGGA | 5135 | UCCAUCGUGUAGCACCAGG |
| siRNA 2112 | 2112 | CUGGUGCUACACGAUGGAC | 5136 | GUCCAUCGUGUAGCACCAG |
| siRNA 2113 | 2113 | UGGUGCUACACGAUGGACC | 5137 | GGUCCAUCGUGUAGCACCA |
| siRNA 2114 | 2114 | GGUGCUACACGAUGGACCC | 5138 | GGGUCCAUCGUGUAGCACC |
| siRNA 2115 | 2115 | GUGCUACACGAUGGACCCA | 5139 | UGGGUCCAUCGUGUAGCAC |
| siRNA 2116 | 2116 | UGCUACACGAUGGACCCAA | 5140 | UUGGGUCCAUCGUGUAGCA |
| siRNA 2117 | 2117 | GCUACACGAUGGACCCAAG | 5141 | CUUGGGUCCAUCGUGUAGC |
| siRNA 2118 | 2118 | CUACACGAUGGACCCAAGG | 5142 | CCUUGGGUCCAUCGUGUAG |
| siRNA 2119 | 2119 | UACACGAUGGACCCAAGGA | 5143 | UCCUUGGGUCCAUCGUGUA |
| siRNA 2120 | 2120 | ACACGAUGGACCCAAGGAC | 5144 | GUCCUUGGGUCCAUCGUGU |
| siRNA 2121 | 2121 | CACGAUGGACCCAAGGACC | 5145 | GGUCCUUGGGUCCAUCGUG |
| siRNA 2122 | 2122 | ACGAUGGACCCAAGGACCC | 5146 | GGGUCCUUGGGUCCAUCGU |
| siRNA 2123 | 2123 | CGAUGGACCCAAGGACCCC | 5147 | GGGGUCCUUGGGUCCAUCG |
| siRNA 2124 | 2124 | GAUGGACCCAAGGACCCCA | 5148 | UGGGGUCCUUGGGUCCAUC |
| siRNA 2125 | 2125 | AUGGACCCAAGGACCCCAU | 5149 | AUGGGGUCCUUGGGUCCAU |
| siRNA 2126 | 2126 | UGGACCCAAGGACCCCAUU | 5150 | AAUGGGGUCCUUGGGUCCA |
| siRNA 2127 | 2127 | GGACCCAAGGACCCCAUUC | 5151 | GAAUGGGGUCCUUGGGUCC |
| siRNA 2128 | 2128 | GACCCAAGGACCCCAUUCG | 5152 | CGAAUGGGGUCCUUGGGUC |
| siRNA 2129 | 2129 | ACCCAAGGACCCCAUUCGA | 5153 | UCGAAUGGGGUCCUUGGGU |
| siRNA 2130 | 2130 | CCCAAGGACCCCAUUCGAC | 5154 | GUCGAAUGGGGUCCUUGGG |
| siRNA 2131 | 2131 | CCAAGGACCCCAUUCGACU | 5155 | AGUCGAAUGGGGUCCUUGG |
| siRNA 2132 | 2132 | CAAGGACCCCAUUCGACUA | 5156 | UAGUCGAAUGGGGUCCUUG |
| siRNA 2133 | 2133 | AAGGACCCCAUUCGACUAC | 5157 | GUAGUCGAAUGGGGUCCUU |
| siRNA 2134 | 2134 | AGGACCCCAUUCGACUACU | 5158 | AGUAGUCGAAUGGGGUCCU |
| siRNA 2135 | 2135 | GGACCCCAUUCGACUACUG | 5159 | CAGUAGUCGAAUGGGGUCC |
| siRNA 2136 | 2136 | GACCCCAUUCGACUACUGU | 5160 | ACAGUAGUCGAAUGGGGUC |
| siRNA 2137 | 2137 | ACCCCAUUCGACUACUGUG | 5161 | CACAGUAGUCGAAUGGGGU |
| siRNA 2138 | 2138 | CCCCAUUCGACUACUGUGC | 5162 | GCACAGUAGUCGAAUGGGG |
| siRNA 2139 | 2139 | CCCAUUCGACUACUGUGCC | 5163 | GGCACAGUAGUCGAAUGGG |
| siRNA 2140 | 2140 | CCAUUCGACUACUGUGCCC | 5164 | GGGCACAGUAGUCGAAUGG |
| siRNA 2141 | 2141 | CAUUCGACUACUGUGCCCU | 5165 | AGGGCACAGUAGUCGAAUG |
| siRNA 2142 | 2142 | AUUCGACUACUGUGCCCUG | 5166 | CAGGGCACAGUAGUCGAAU |
| siRNA 2143 | 2143 | UUCGACUACUGUGCCCUGC | 5167 | GCAGGGCACAGUAGUCGAA |
| siRNA 2144 | 2144 | UCGACUACUGUGCCCUGCG | 5168 | CGCAGGGCACAGUAGUCGA |
| siRNA 2145 | 2145 | CGACUACUGUGCCCUGCGA | 5169 | UCGCAGGGCACAGUAGUCG |
| siRNA 2146 | 2146 | GACUACUGUGCCCUGCGAC | 5170 | GUCGCAGGGCACAGUAGUC |
| siRNA 2147 | 2147 | ACUACUGUGCCCUGCGACG | 5171 | CGUCGCAGGGCACAGUAGU |
| siRNA 2148 | 2148 | CUACUGUGCCCUGCGACGC | 5172 | GCGUCGCAGGGCACAGUAG |
| siRNA 2149 | 2149 | UACUGUGCCCUGCGACGCU | 5173 | AGCGUCGCAGGGCACAGUA |
| siRNA 2150 | 2150 | ACUGUGCCCUGCGACGCUG | 5174 | CAGCGUCGCAGGGCACAGU |
| siRNA 2151 | 2151 | CUGUGCCCUGCGACGCUGC | 5175 | GCAGCGUCGCAGGGCACAG |
| siRNA 2152 | 2152 | UGUGCCCUGCGACGCUGCG | 5176 | CGCAGCGUCGCAGGGCACA |
| siRNA 2153 | 2153 | GUGCCCUGCGACGCUGCGC | 5177 | GCGCAGCGUCGCAGGGCAC |
| siRNA 2154 | 2154 | UGCCCUGCGACGCUGCGCU | 5178 | AGCGCAGCGUCGCAGGGCA |
| siRNA 2155 | 2155 | GCCCUGCGACGCUGCGCUG | 5179 | CAGCGCAGCGUCGCAGGGC |
| siRNA 2156 | 2156 | CCCUGCGACGCUGCGCUGA | 5180 | UCAGCGCAGCGUCGCAGGG |
| siRNA 2157 | 2157 | CCUGCGACGCUGCGCUGAU | 5181 | AUCAGCGCAGCGUCGCAGG |
| siRNA 2158 | 2158 | CUGCGACGCUGCGCUGAUG | 5182 | CAUCAGCGCAGCGUCGCAG |
| siRNA 2159 | 2159 | UGCGACGCUGCGCUGAUGA | 5183 | UCAUCAGCGCAGCGUCGCA |
| siRNA 2160 | 2160 | GCGACGCUGCGCUGAUGAC | 5184 | GUCAUCAGCGCAGCGUCGC |
| siRNA 2161 | 2161 | CGACGCUGCGCUGAUGACC | 5185 | GGUCAUCAGCGCAGCGUCG |
| siRNA 2162 | 2162 | GACGCUGCGCUGAUGACCA | 5186 | UGGUCAUCAGCGCAGCGUC |
| siRNA 2163 | 2163 | ACGCUGCGCUGAUGACCAG | 5187 | CUGGUCAUCAGCGCAGCGU |
| siRNA 2164 | 2164 | CGCUGCGCUGAUGACCAGC | 5188 | GCUGGUCAUCAGCGCAGCG |
| siRNA 2165 | 2165 | GCUGCGCUGAUGACCAGCC | 5189 | GGCUGGUCAUCAGCGCAGC |
| siRNA 2166 | 2166 | CUGCGCUGAUGACCAGCCG | 5190 | CGGCUGGUCAUCAGCGCAG |
| siRNA 2167 | 2167 | UGCGCUGAUGACCAGCCGC | 5191 | GCGGCUGGUCAUCAGCGCA |
| siRNA 2168 | 2168 | GCGCUGAUGACCAGCCGCC | 5192 | GGCGGCUGGUCAUCAGCGC |
| siRNA 2169 | 2169 | CGCUGAUGACCAGCCGCCA | 5193 | UGGCGGCUGGUCAUCAGCG |
| siRNA 2170 | 2170 | GCUGAUGACCAGCCGCCAU | 5194 | AUGGCGGCUGGUCAUCAGC |
| siRNA 2171 | 2171 | CUGAUGACCAGCCGCCAUC | 5195 | GAUGGCGGCUGGUCAUCAG |
| siRNA 2172 | 2172 | UGAUGACCAGCCGCCAUCA | 5196 | UGAUGGCGGCUGGUCAUCA |
| siRNA 2173 | 2173 | GAUGACCAGCCGCCAUCAA | 5197 | UUGAUGGCGGCUGGUCAUC |
| siRNA 2174 | 2174 | AUGACCAGCCGCCAUCAAU | 5198 | AUUGAUGGCGGCUGGUCAU |
| siRNA 2175 | 2175 | UGACCAGCCGCCAUCAAUC | 5199 | GAUUGAUGGCGGCUGGUCA |
| siRNA 2176 | 2176 | GACCAGCCGCCAUCAAUCC | 5200 | GGAUUGAUGGCGGCUGGUC |
| siRNA 2177 | 2177 | ACCAGCCGCCAUCAAUCCU | 5201 | AGGAUUGAUGGCGGCUGGU |
| siRNA 2178 | 2178 | CCAGCCGCCAUCAAUCCUG | 5202 | CAGGAUUGAUGGCGGCUGG |
| siRNA 2179 | 2179 | CAGCCGCCAUCAAUCCUGG | 5203 | CCAGGAUUGAUGGCGGCUG |
| siRNA 2180 | 2180 | AGCCGCCAUCAAUCCUGGA | 5204 | UCCAGGAUUGAUGGCGGCU |
| siRNA 2181 | 2181 | GCCGCCAUCAAUCCUGGAC | 5205 | GUCCAGGAUUGAUGGCGGC |
| siRNA 2182 | 2182 | CCGCCAUCAAUCCUGGACC | 5206 | GGUCCAGGAUUGAUGGCGG |
| siRNA 2183 | 2183 | CGCCAUCAAUCCUGGACCC | 5207 | GGGUCCAGGAUUGAUGGCG |
| siRNA 2184 | 2184 | GCCAUCAAUCCUGGACCCC | 5208 | GGGGUCCAGGAUUGAUGGC |
| siRNA 2185 | 2185 | CCAUCAAUCCUGGACCCCC | 5209 | GGGGGUCCAGGAUUGAUGG |
| siRNA 2186 | 2186 | CAUCAAUCCUGGACCCCCC | 5210 | GGGGGGUCCAGGAUUGAUG |
| siRNA 2187 | 2187 | AUCAAUCCUGGACCCCCCA | 5211 | UGGGGGGUCCAGGAUUGAU |
| siRNA 2188 | 2188 | UCAAUCCUGGACCCCCCAG | 5212 | CUGGGGGGUCCAGGAUUGA |
| siRNA 2189 | 2189 | CAAUCCUGGACCCCCCAGA | 5213 | UCUGGGGGGUCCAGGAUUG |
| siRNA 2190 | 2190 | AAUCCUGGACCCCCCAGAC | 5214 | GUCUGGGGGGUCCAGGAUU |
| siRNA 2191 | 2191 | AUCCUGGACCCCCCAGACC | 5215 | GGUCUGGGGGGUCCAGGAU |
| siRNA 2192 | 2192 | UCCUGGACCCCCCAGACCA | 5216 | UGGUCUGGGGGGUCCAGGA |
| siRNA 2193 | 2193 | CCUGGACCCCCCAGACCAG | 5217 | CUGGUCUGGGGGGUCCAGG |
| siRNA 2194 | 2194 | CUGGACCCCCCAGACCAGG | 5218 | CCUGGUCUGGGGGGUCCAG |
| siRNA 2195 | 2195 | UGGACCCCCCAGACCAGGU | 5219 | ACCUGGUCUGGGGGGUCCA |
| siRNA 2196 | 2196 | GGACCCCCCAGACCAGGUG | 5220 | CACCUGGUCUGGGGGGUCC |
| siRNA 2197 | 2197 | GACCCCCCAGACCAGGUGC | 5221 | GCACCUGGUCUGGGGGGUC |
| siRNA 2198 | 2198 | ACCCCCCAGACCAGGUGCA | 5222 | UGCACCUGGUCUGGGGGGU |
| siRNA 2199 | 2199 | CCCCCCAGACCAGGUGCAG | 5223 | CUGCACCUGGUCUGGGGGG |
| siRNA 2200 | 2200 | CCCCCAGACCAGGUGCAGU | 5224 | ACUGCACCUGGUCUGGGGG |
| siRNA 2201 | 2201 | CCCCAGACCAGGUGCAGUU | 5225 | AACUGCACCUGGUCUGGGG |
| siRNA 2202 | 2202 | CCCAGACCAGGUGCAGUUU | 5226 | AAACUGCACCUGGUCUGGG |
| siRNA 2203 | 2203 | CCAGACCAGGUGCAGUUUG | 5227 | CAAACUGCACCUGGUCUGG |
| siRNA 2204 | 2204 | CAGACCAGGUGCAGUUUGA | 5228 | UCAAACUGCACCUGGUCUG |
| siRNA 2205 | 2205 | AGACCAGGUGCAGUUUGAG | 5229 | CUCAAACUGCACCUGGUCU |
| siRNA 2206 | 2206 | GACCAGGUGCAGUUUGAGA | 5230 | UCUCAAACUGCACCUGGUC |
| siRNA 2207 | 2207 | ACCAGGUGCAGUUUGAGAA | 5231 | UUCUCAAACUGCACCUGGU |
| siRNA 2208 | 2208 | CCAGGUGCAGUUUGAGAAG | 5232 | CUUCUCAAACUGCACCUGG |
| siRNA 2209 | 2209 | CAGGUGCAGUUUGAGAAGU | 5233 | ACUUCUCAAACUGCACCUG |
| siRNA 2210 | 2210 | AGGUGCAGUUUGAGAAGUG | 5234 | CACUUCUCAAACUGCACCU |
| siRNA 2211 | 2211 | GGUGCAGUUUGAGAAGUGU | 5235 | ACACUUCUCAAACUGCACC |
| siRNA 2212 | 2212 | GUGCAGUUUGAGAAGUGUG | 5236 | CACACUUCUCAAACUGCAC |
| siRNA 2213 | 2213 | UGCAGUUUGAGAAGUGUGG | 5237 | CCACACUUCUCAAACUGCA |
| siRNA 2214 | 2214 | GCAGUUUGAGAAGUGUGGC | 5238 | GCCACACUUCUCAAACUGC |
| siRNA 2215 | 2215 | CAGUUUGAGAAGUGUGGCA | 5239 | UGCCACACUUCUCAAACUG |
| siRNA 2216 | 2216 | AGUUUGAGAAGUGUGGCAA | 5240 | UUGCCACACUUCUCAAACU |
| siRNA 2217 | 2217 | GUUUGAGAAGUGUGGCAAG | 5241 | CUUGCCACACUUCUCAAAC |
| siRNA 2218 | 2218 | UUUGAGAAGUGUGGCAAGA | 5242 | UCUUGCCACACUUCUCAAA |
| siRNA 2219 | 2219 | UUGAGAAGUGUGGCAAGAG | 5243 | CUCUUGCCACACUUCUCAA |
| siRNA 2220 | 2220 | UGAGAAGUGUGGCAAGAGG | 5244 | CCUCUUGCCACACUUCUCA |
| siRNA 2221 | 2221 | GAGAAGUGUGGCAAGAGGG | 5245 | CCCUCUUGCCACACUUCUC |
| siRNA 2222 | 2222 | AGAAGUGUGGCAAGAGGGU | 5246 | ACCCUCUUGCCACACUUCU |
| siRNA 2223 | 2223 | GAAGUGUGGCAAGAGGGUG | 5247 | CACCCUCUUGCCACACUUC |
| siRNA 2224 | 2224 | AAGUGUGGCAAGAGGGUGG | 5248 | CCACCCUCUUGCCACACUU |
| siRNA 2225 | 2225 | AGUGUGGCAAGAGGGUGGA | 5249 | UCCACCCUCUUGCCACACU |
| siRNA 2226 | 2226 | GUGUGGCAAGAGGGUGGAU | 5250 | AUCCACCCUCUUGCCACAC |
| siRNA 2227 | 2227 | UGUGGCAAGAGGGUGGAUC | 5251 | GAUCCACCCUCUUGCCACA |
| siRNA 2228 | 2228 | GUGGCAAGAGGGUGGAUCG | 5252 | CGAUCCACCCUCUUGCCAC |
| siRNA 2229 | 2229 | UGGCAAGAGGGUGGAUCGG | 5253 | CCGAUCCACCCUCUUGCCA |
| siRNA 2230 | 2230 | GGCAAGAGGGUGGAUCGGC | 5254 | GCCGAUCCACCCUCUUGCC |
| siRNA 2231 | 2231 | GCAAGAGGGUGGAUCGGCU | 5255 | AGCCGAUCCACCCUCUUGC |
| siRNA 2232 | 2232 | CAAGAGGGUGGAUCGGCUG | 5256 | CAGCCGAUCCACCCUCUUG |
| siRNA 2233 | 2233 | AAGAGGGUGGAUCGGCUGG | 5257 | CCAGCCGAUCCACCCUCUU |
| siRNA 2234 | 2234 | AGAGGGUGGAUCGGCUGGA | 5258 | UCCAGCCGAUCCACCCUCU |
| siRNA 2235 | 2235 | GAGGGUGGAUCGGCUGGAU | 5259 | AUCCAGCCGAUCCACCCUC |
| siRNA 2236 | 2236 | AGGGUGGAUCGGCUGGAUC | 5260 | GAUCCAGCCGAUCCACCCU |
| siRNA 2237 | 2237 | GGGUGGAUCGGCUGGAUCA | 5261 | UGAUCCAGCCGAUCCACCC |
| siRNA 2238 | 2238 | GGUGGAUCGGCUGGAUCAG | 5262 | CUGAUCCAGCCGAUCCACC |
| siRNA 2239 | 2239 | GUGGAUCGGCUGGAUCAGC | 5263 | GCUGAUCCAGCCGAUCCAC |
| siRNA 2240 | 2240 | UGGAUCGGCUGGAUCAGCG | 5264 | CGCUGAUCCAGCCGAUCCA |
| siRNA 2241 | 2241 | GGAUCGGCUGGAUCAGCGG | 5265 | CCGCUGAUCCAGCCGAUCC |
| siRNA 2242 | 2242 | GAUCGGCUGGAUCAGCGGC | 5266 | GCCGCUGAUCCAGCCGAUC |
| siRNA 2243 | 2243 | AUCGGCUGGAUCAGCGGCG | 5267 | CGCCGCUGAUCCAGCCGAU |
| siRNA 2244 | 2244 | UCGGCUGGAUCAGCGGCGU | 5268 | ACGCCGCUGAUCCAGCCGA |
| siRNA 2245 | 2245 | CGGCUGGAUCAGCGGCGUU | 5269 | AACGCCGCUGAUCCAGCCG |
| siRNA 2246 | 2246 | GGCUGGAUCAGCGGCGUUC | 5270 | GAACGCCGCUGAUCCAGCC |
| siRNA 2247 | 2247 | GCUGGAUCAGCGGCGUUCC | 5271 | GGAACGCCGCUGAUCCAGC |
| siRNA 2248 | 2248 | CUGGAUCAGCGGCGUUCCA | 5272 | UGGAACGCCGCUGAUCCAG |
| siRNA 2249 | 2249 | UGGAUCAGCGGCGUUCCAA | 5273 | UUGGAACGCCGCUGAUCCA |
| siRNA 2250 | 2250 | GGAUCAGCGGCGUUCCAAG | 5274 | CUUGGAACGCCGCUGAUCC |
| siRNA 2251 | 2251 | GAUCAGCGGCGUUCCAAGC | 5275 | GCUUGGAACGCCGCUGAUC |
| siRNA 2252 | 2252 | AUCAGCGGCGUUCCAAGCU | 5276 | AGCUUGGAACGCCGCUGAU |
| siRNA 2253 | 2253 | UCAGCGGCGUUCCAAGCUG | 5277 | CAGCUUGGAACGCCGCUGA |
| siRNA 2254 | 2254 | CAGCGGCGUUCCAAGCUGC | 5278 | GCAGCUUGGAACGCCGCUG |
| siRNA 2255 | 2255 | AGCGGCGUUCCAAGCUGCG | 5279 | CGCAGCUUGGAACGCCGCU |
| siRNA 2256 | 2256 | GCGGCGUUCCAAGCUGCGC | 5280 | GCGCAGCUUGGAACGCCGC |
| siRNA 2257 | 2257 | CGGCGUUCCAAGCUGCGCG | 5281 | CGCGCAGCUUGGAACGCCG |
| siRNA 2258 | 2258 | GGCGUUCCAAGCUGCGCGU | 5282 | ACGCGCAGCUUGGAACGCC |
| siRNA 2259 | 2259 | GCGUUCCAAGCUGCGCGUG | 5283 | CACGCGCAGCUUGGAACGC |
| siRNA 2260 | 2260 | CGUUCCAAGCUGCGCGUGG | 5284 | CCACGCGCAGCUUGGAACG |
| siRNA 2261 | 2261 | GUUCCAAGCUGCGCGUGGU | 5285 | ACCACGCGCAGCUUGGAAC |
| siRNA 2262 | 2262 | UUCCAAGCUGCGCGUGGUU | 5286 | AACCACGCGCAGCUUGGAA |
| siRNA 2263 | 2263 | UCCAAGCUGCGCGUGGUUG | 5287 | CAACCACGCGCAGCUUGGA |
| siRNA 2264 | 2264 | CCAAGCUGCGCGUGGUUGG | 5288 | CCAACCACGCGCAGCUUGG |
| siRNA 2265 | 2265 | CAAGCUGCGCGUGGUUGGG | 5289 | CCCAACCACGCGCAGCUUG |
| siRNA 2266 | 2266 | AAGCUGCGCGUGGUUGGGG | 5290 | CCCCAACCACGCGCAGCUU |
| siRNA 2267 | 2267 | AGCUGCGCGUGGUUGGGGG | 5291 | CCCCCAACCACGCGCAGCU |
| siRNA 2268 | 2268 | GCUGCGCGUGGUUGGGGGC | 5292 | GCCCCCAACCACGCGCAGC |
| siRNA 2269 | 2269 | CUGCGCGUGGUUGGGGGCC | 5293 | GGCCCCCAACCACGCGCAG |
| siRNA 2270 | 2270 | UGCGCGUGGUUGGGGGCCA | 5294 | UGGCCCCCAACCACGCGCA |
| siRNA 2271 | 2271 | GCGCGUGGUUGGGGGCCAU | 5295 | AUGGCCCCCAACCACGCGC |
| siRNA 2272 | 2272 | CGCGUGGUUGGGGGCCAUC | 5296 | GAUGGCCCCCAACCACGCG |
| siRNA 2273 | 2273 | GCGUGGUUGGGGGCCAUCC | 5297 | GGAUGGCCCCCAACCACGC |
| siRNA 2274 | 2274 | CGUGGUUGGGGGCCAUCCG | 5298 | CGGAUGGCCCCCAACCACG |
| siRNA 2275 | 2275 | GUGGUUGGGGGCCAUCCGG | 5299 | CCGGAUGGCCCCCAACCAC |
| siRNA 2276 | 2276 | UGGUUGGGGGCCAUCCGGG | 5300 | CCCGGAUGGCCCCCAACCA |
| siRNA 2277 | 2277 | GGUUGGGGGCCAUCCGGGC | 5301 | GCCCGGAUGGCCCCCAACC |
| siRNA 2278 | 2278 | GUUGGGGGCCAUCCGGGCA | 5302 | UGCCCGGAUGGCCCCCAAC |
| siRNA 2279 | 2279 | UUGGGGGCCAUCCGGGCAA | 5303 | UUGCCCGGAUGGCCCCCAA |
| siRNA 2280 | 2280 | UGGGGGCCAUCCGGGCAAC | 5304 | GUUGCCCGGAUGGCCCCCA |
| siRNA 2281 | 2281 | GGGGGCCAUCCGGGCAACU | 5305 | AGUUGCCCGGAUGGCCCCC |
| siRNA 2282 | 2282 | GGGGCCAUCCGGGCAACUC | 5306 | GAGUUGCCCGGAUGGCCCC |
| siRNA 2283 | 2283 | GGGCCAUCCGGGCAACUCA | 5307 | UGAGUUGCCCGGAUGGCCC |
| siRNA 2284 | 2284 | GGCCAUCCGGGCAACUCAC | 5308 | GUGAGUUGCCCGGAUGGCC |
| siRNA 2285 | 2285 | GCCAUCCGGGCAACUCACC | 5309 | GGUGAGUUGCCCGGAUGGC |
| siRNA 2286 | 2286 | CCAUCCGGGCAACUCACCC | 5310 | GGGUGAGUUGCCCGGAUGG |
| siRNA 2287 | 2287 | CAUCCGGGCAACUCACCCU | 5311 | AGGGUGAGUUGCCCGGAUG |
| siRNA 2288 | 2288 | AUCCGGGCAACUCACCCUG | 5312 | CAGGGUGAGUUGCCCGGAU |
| siRNA 2289 | 2289 | UCCGGGCAACUCACCCUGG | 5313 | CCAGGGUGAGUUGCCCGGA |
| siRNA 2290 | 2290 | CCGGGCAACUCACCCUGGA | 5314 | UCCAGGGUGAGUUGCCCGG |
| siRNA 2291 | 2291 | CGGGCAACUCACCCUGGAC | 5315 | GUCCAGGGUGAGUUGCCCG |
| siRNA 2292 | 2292 | GGGCAACUCACCCUGGACA | 5316 | UGUCCAGGGUGAGUUGCCC |
| siRNA 2293 | 2293 | GGCAACUCACCCUGGACAG | 5317 | CUGUCCAGGGUGAGUUGCC |
| siRNA 2294 | 2294 | GCAACUCACCCUGGACAGU | 5318 | ACUGUCCAGGGUGAGUUGC |
| siRNA 2295 | 2295 | CAACUCACCCUGGACAGUC | 5319 | GACUGUCCAGGGUGAGUUG |
| siRNA 2296 | 2296 | AACUCACCCUGGACAGUCA | 5320 | UGACUGUCCAGGGUGAGUU |
| siRNA 2297 | 2297 | ACUCACCCUGGACAGUCAG | 5321 | CUGACUGUCCAGGGUGAGU |
| siRNA 2298 | 2298 | CUCACCCUGGACAGUCAGC | 5322 | GCUGACUGUCCAGGGUGAG |
| siRNA 2299 | 2299 | UCACCCUGGACAGUCAGCU | 5323 | AGCUGACUGUCCAGGGUGA |
| siRNA 2300 | 2300 | CACCCUGGACAGUCAGCUU | 5324 | AAGCUGACUGUCCAGGGUG |
| siRNA 2301 | 2301 | ACCCUGGACAGUCAGCUUG | 5325 | CAAGCUGACUGUCCAGGGU |
| siRNA 2302 | 2302 | CCCUGGACAGUCAGCUUGC | 5326 | GCAAGCUGACUGUCCAGGG |
| siRNA 2303 | 2303 | CCUGGACAGUCAGCUUGCG | 5327 | CGCAAGCUGACUGUCCAGG |
| siRNA 2304 | 2304 | CUGGACAGUCAGCUUGCGG | 5328 | CCGCAAGCUGACUGUCCAG |
| siRNA 2305 | 2305 | UGGACAGUCAGCUUGCGGA | 5329 | UCCGCAAGCUGACUGUCCA |
| siRNA 2306 | 2306 | GGACAGUCAGCUUGCGGAA | 5330 | UUCCGCAAGCUGACUGUCC |
| siRNA 2307 | 2307 | GACAGUCAGCUUGCGGAAU | 5331 | AUUCCGCAAGCUGACUGUC |
| siRNA 2308 | 2308 | ACAGUCAGCUUGCGGAAUC | 5332 | GAUUCCGCAAGCUGACUGU |
| siRNA 2309 | 2309 | CAGUCAGCUUGCGGAAUCG | 5333 | CGAUUCCGCAAGCUGACUG |
| siRNA 2310 | 2310 | AGUCAGCUUGCGGAAUCGG | 5334 | CCGAUUCCGCAAGCUGACU |
| siRNA 2311 | 2311 | GUCAGCUUGCGGAAUCGGC | 5335 | GCCGAUUCCGCAAGCUGAC |
| siRNA 2312 | 2312 | UCAGCUUGCGGAAUCGGCA | 5336 | UGCCGAUUCCGCAAGCUGA |
| siRNA 2313 | 2313 | CAGCUUGCGGAAUCGGCAG | 5337 | CUGCCGAUUCCGCAAGCUG |
| siRNA 2314 | 2314 | AGCUUGCGGAAUCGGCAGG | 5338 | CCUGCCGAUUCCGCAAGCU |
| siRNA 2315 | 2315 | GCUUGCGGAAUCGGCAGGG | 5339 | CCCUGCCGAUUCCGCAAGC |
| siRNA 2316 | 2316 | CUUGCGGAAUCGGCAGGGC | 5340 | GCCCUGCCGAUUCCGCAAG |
| siRNA 2317 | 2317 | UUGCGGAAUCGGCAGGGCC | 5341 | GGCCCUGCCGAUUCCGCAA |
| siRNA 2318 | 2318 | UGCGGAAUCGGCAGGGCCA | 5342 | UGGCCCUGCCGAUUCCGCA |
| siRNA 2319 | 2319 | GCGGAAUCGGCAGGGCCAG | 5343 | CUGGCCCUGCCGAUUCCGC |
| siRNA 2320 | 2320 | CGGAAUCGGCAGGGCCAGC | 5344 | GCUGGCCCUGCCGAUUCCG |
| siRNA 2321 | 2321 | GGAAUCGGCAGGGCCAGCA | 5345 | UGCUGGCCCUGCCGAUUCC |
| siRNA 2322 | 2322 | GAAUCGGCAGGGCCAGCAU | 5346 | AUGCUGGCCCUGCCGAUUC |
| siRNA 2323 | 2323 | AAUCGGCAGGGCCAGCAUU | 5347 | AAUGCUGGCCCUGCCGAUU |
| siRNA 2324 | 2324 | AUCGGCAGGGCCAGCAUUU | 5348 | AAAUGCUGGCCCUGCCGAU |
| siRNA 2325 | 2325 | UCGGCAGGGCCAGCAUUUC | 5349 | GAAAUGCUGGCCCUGCCGA |
| siRNA 2326 | 2326 | CGGCAGGGCCAGCAUUUCU | 5350 | AGAAAUGCUGGCCCUGCCG |
| siRNA 2327 | 2327 | GGCAGGGCCAGCAUUUCUG | 5351 | CAGAAAUGCUGGCCCUGCC |
| siRNA 2328 | 2328 | GCAGGGCCAGCAUUUCUGC | 5352 | GCAGAAAUGCUGGCCCUGC |
| siRNA 2329 | 2329 | CAGGGCCAGCAUUUCUGCG | 5353 | CGCAGAAAUGCUGGCCCUG |
| siRNA 2330 | 2330 | AGGGCCAGCAUUUCUGCGG | 5354 | CCGCAGAAAUGCUGGCCCU |
| siRNA 2331 | 2331 | GGGCCAGCAUUUCUGCGGG | 5355 | CCCGCAGAAAUGCUGGCCC |
| siRNA 2332 | 2332 | GGCCAGCAUUUCUGCGGGG | 5356 | CCCCGCAGAAAUGCUGGCC |
| siRNA 2333 | 2333 | GCCAGCAUUUCUGCGGGGG | 5357 | CCCCCGCAGAAAUGCUGGC |
| siRNA 2334 | 2334 | CCAGCAUUUCUGCGGGGGG | 5358 | CCCCCCGCAGAAAUGCUGG |
| siRNA 2335 | 2335 | CAGCAUUUCUGCGGGGGGU | 5359 | ACCCCCCGCAGAAAUGCUG |
| siRNA 2336 | 2336 | AGCAUUUCUGCGGGGGGUC | 5360 | GACCCCCCGCAGAAAUGCU |
| siRNA 2337 | 2337 | GCAUUUCUGCGGGGGGUCU | 5361 | AGACCCCCCGCAGAAAUGC |
| siRNA 2338 | 2338 | CAUUUCUGCGGGGGGUCUC | 5362 | GAGACCCCCCGCAGAAAUG |
| siRNA 2339 | 2339 | AUUUCUGCGGGGGGUCUCU | 5363 | AGAGACCCCCCGCAGAAAU |
| siRNA 2340 | 2340 | UUUCUGCGGGGGGUCUCUA | 5364 | UAGAGACCCCCCGCAGAAA |
| siRNA 2341 | 2341 | UUCUGCGGGGGGUCUCUAG | 5365 | CUAGAGACCCCCCGCAGAA |
| siRNA 2342 | 2342 | UCUGCGGGGGGUCUCUAGU | 5366 | ACUAGAGACCCCCCGCAGA |
| siRNA 2343 | 2343 | CUGCGGGGGGUCUCUAGUG | 5367 | CACUAGAGACCCCCCGCAG |
| siRNA 2344 | 2344 | UGCGGGGGGUCUCUAGUGA | 5368 | UCACUAGAGACCCCCCGCA |
| siRNA 2345 | 2345 | GCGGGGGGUCUCUAGUGAA | 5369 | UUCACUAGAGACCCCCCGC |
| siRNA 2346 | 2346 | CGGGGGGUCUCUAGUGAAG | 5370 | CUUCACUAGAGACCCCCCG |
| siRNA 2347 | 2347 | GGGGGGUCUCUAGUGAAGG | 5371 | CCUUCACUAGAGACCCCCC |
| siRNA 2348 | 2348 | GGGGGUCUCUAGUGAAGGA | 5372 | UCCUUCACUAGAGACCCCC |
| siRNA 2349 | 2349 | GGGGUCUCUAGUGAAGGAG | 5373 | CUCCUUCACUAGAGACCCC |
| siRNA 2350 | 2350 | GGGUCUCUAGUGAAGGAGC | 5374 | GCUCCUUCACUAGAGACCC |
| siRNA 2351 | 2351 | GGUCUCUAGUGAAGGAGCA | 5375 | UGCUCCUUCACUAGAGACC |
| siRNA 2352 | 2352 | GUCUCUAGUGAAGGAGCAG | 5376 | CUGCUCCUUCACUAGAGAC |
| siRNA 2353 | 2353 | UCUCUAGUGAAGGAGCAGU | 5377 | ACUGCUCCUUCACUAGAGA |
| siRNA 2354 | 2354 | CUCUAGUGAAGGAGCAGUG | 5378 | CACUGCUCCUUCACUAGAG |
| siRNA 2355 | 2355 | UCUAGUGAAGGAGCAGUGG | 5379 | CCACUGCUCCUUCACUAGA |
| siRNA 2356 | 2356 | CUAGUGAAGGAGCAGUGGA | 5380 | UCCACUGCUCCUUCACUAG |
| siRNA 2357 | 2357 | UAGUGAAGGAGCAGUGGAU | 5381 | AUCCACUGCUCCUUCACUA |
| siRNA 2358 | 2358 | AGUGAAGGAGCAGUGGAUA | 5382 | UAUCCACUGCUCCUUCACU |
| siRNA 2359 | 2359 | GUGAAGGAGCAGUGGAUAC | 5383 | GUAUCCACUGCUCCUUCAC |
| siRNA 2360 | 2360 | UGAAGGAGCAGUGGAUACU | 5384 | AGUAUCCACUGCUCCUUCA |
| siRNA 2361 | 2361 | GAAGGAGCAGUGGAUACUG | 5385 | CAGUAUCCACUGCUCCUUC |
| siRNA 2362 | 2362 | AAGGAGCAGUGGAUACUGA | 5386 | UCAGUAUCCACUGCUCCUU |
| siRNA 2363 | 2363 | AGGAGCAGUGGAUACUGAC | 5387 | GUCAGUAUCCACUGCUCCU |
| siRNA 2364 | 2364 | GGAGCAGUGGAUACUGACU | 5388 | AGUCAGUAUCCACUGCUCC |
| siRNA 2365 | 2365 | GAGCAGUGGAUACUGACUG | 5389 | CAGUCAGUAUCCACUGCUC |
| siRNA 2366 | 2366 | AGCAGUGGAUACUGACUGC | 5390 | GCAGUCAGUAUCCACUGCU |
| siRNA 2367 | 2367 | GCAGUGGAUACUGACUGCC | 5391 | GGCAGUCAGUAUCCACUGC |
| siRNA 2368 | 2368 | CAGUGGAUACUGACUGCCC | 5392 | GGGCAGUCAGUAUCCACUG |
| siRNA 2369 | 2369 | AGUGGAUACUGACUGCCCG | 5393 | CGGGCAGUCAGUAUCCACU |
| siRNA 2370 | 2370 | GUGGAUACUGACUGCCCGG | 5394 | CCGGGCAGUCAGUAUCCAC |
| siRNA 2371 | 2371 | UGGAUACUGACUGCCCGGC | 5395 | GCCGGGCAGUCAGUAUCCA |
| siRNA 2372 | 2372 | GGAUACUGACUGCCCGGCA | 5396 | UGCCGGGCAGUCAGUAUCC |
| siRNA 2373 | 2373 | GAUACUGACUGCCCGGCAG | 5397 | CUGCCGGGCAGUCAGUAUC |
| siRNA 2374 | 2374 | AUACUGACUGCCCGGCAGU | 5398 | ACUGCCGGGCAGUCAGUAU |
| siRNA 2375 | 2375 | UACUGACUGCCCGGCAGUG | 5399 | CACUGCCGGGCAGUCAGUA |
| siRNA 2376 | 2376 | ACUGACUGCCCGGCAGUGC | 5400 | GCACUGCCGGGCAGUCAGU |
| siRNA 2377 | 2377 | CUGACUGCCCGGCAGUGCU | 5401 | AGCACUGCCGGGCAGUCAG |
| siRNA 2378 | 2378 | UGACUGCCCGGCAGUGCUU | 5402 | AAGCACUGCCGGGCAGUCA |
| siRNA 2379 | 2379 | GACUGCCCGGCAGUGCUUC | 5403 | GAAGCACUGCCGGGCAGUC |
| siRNA 2380 | 2380 | ACUGCCCGGCAGUGCUUCU | 5404 | AGAAGCACUGCCGGGCAGU |
| siRNA 2381 | 2381 | CUGCCCGGCAGUGCUUCUC | 5405 | GAGAAGCACUGCCGGGCAG |
| siRNA 2382 | 2382 | UGCCCGGCAGUGCUUCUCC | 5406 | GGAGAAGCACUGCCGGGCA |
| siRNA 2383 | 2383 | GCCCGGCAGUGCUUCUCCU | 5407 | AGGAGAAGCACUGCCGGGC |
| siRNA 2384 | 2384 | CCCGGCAGUGCUUCUCCUC | 5408 | GAGGAGAAGCACUGCCGGG |
| siRNA 2385 | 2385 | CCGGCAGUGCUUCUCCUCC | 5409 | GGAGGAGAAGCACUGCCGG |
| siRNA 2386 | 2386 | CGGCAGUGCUUCUCCUCCU | 5410 | AGGAGGAGAAGCACUGCCG |
| siRNA 2387 | 2387 | GGCAGUGCUUCUCCUCCUG | 5411 | CAGGAGGAGAAGCACUGCC |
| siRNA 2388 | 2388 | GCAGUGCUUCUCCUCCUGC | 5412 | GCAGGAGGAGAAGCACUGC |
| siRNA 2389 | 2389 | CAGUGCUUCUCCUCCUGCC | 5413 | GGCAGGAGGAGAAGCACUG |
| siRNA 2390 | 2390 | AGUGCUUCUCCUCCUGCCA | 5414 | UGGCAGGAGGAGAAGCACU |
| siRNA 2391 | 2391 | GUGCUUCUCCUCCUGCCAU | 5415 | AUGGCAGGAGGAGAAGCAC |
| siRNA 2392 | 2392 | UGCUUCUCCUCCUGCCAUA | 5416 | UAUGGCAGGAGGAGAAGCA |
| siRNA 2393 | 2393 | GCUUCUCCUCCUGCCAUAU | 5417 | AUAUGGCAGGAGGAGAAGC |
| siRNA 2394 | 2394 | CUUCUCCUCCUGCCAUAUG | 5418 | CAUAUGGCAGGAGGAGAAG |
| siRNA 2395 | 2395 | UUCUCCUCCUGCCAUAUGC | 5419 | GCAUAUGGCAGGAGGAGAA |
| siRNA 2396 | 2396 | UCUCCUCCUGCCAUAUGCC | 5420 | GGCAUAUGGCAGGAGGAGA |
| siRNA 2397 | 2397 | CUCCUCCUGCCAUAUGCCU | 5421 | AGGCAUAUGGCAGGAGGAG |
| siRNA 2398 | 2398 | UCCUCCUGCCAUAUGCCUC | 5422 | GAGGCAUAUGGCAGGAGGA |
| siRNA 2399 | 2399 | CCUCCUGCCAUAUGCCUCU | 5423 | AGAGGCAUAUGGCAGGAGG |
| siRNA 2400 | 2400 | CUCCUGCCAUAUGCCUCUC | 5424 | GAGAGGCAUAUGGCAGGAG |
| siRNA 2401 | 2401 | UCCUGCCAUAUGCCUCUCA | 5425 | UGAGAGGCAUAUGGCAGGA |
| siRNA 2402 | 2402 | CCUGCCAUAUGCCUCUCAC | 5426 | GUGAGAGGCAUAUGGCAGG |
| siRNA 2403 | 2403 | CUGCCAUAUGCCUCUCACG | 5427 | CGUGAGAGGCAUAUGGCAG |
| siRNA 2404 | 2404 | UGCCAUAUGCCUCUCACGG | 5428 | CCGUGAGAGGCAUAUGGCA |
| siRNA 2405 | 2405 | GCCAUAUGCCUCUCACGGG | 5429 | CCCGUGAGAGGCAUAUGGC |
| siRNA 2406 | 2406 | CCAUAUGCCUCUCACGGGC | 5430 | GCCCGUGAGAGGCAUAUGG |
| siRNA 2407 | 2407 | CAUAUGCCUCUCACGGGCU | 5431 | AGCCCGUGAGAGGCAUAUG |
| siRNA 2408 | 2408 | AUAUGCCUCUCACGGGCUA | 5432 | UAGCCCGUGAGAGGCAUAU |
| siRNA 2409 | 2409 | UAUGCCUCUCACGGGCUAU | 5433 | AUAGCCCGUGAGAGGCAUA |
| siRNA 2410 | 2410 | AUGCCUCUCACGGGCUAUG | 5434 | CAUAGCCCGUGAGAGGCAU |
| siRNA 2411 | 2411 | UGCCUCUCACGGGCUAUGA | 5435 | UCAUAGCCCGUGAGAGGCA |
| siRNA 2412 | 2412 | GCCUCUCACGGGCUAUGAG | 5436 | CUCAUAGCCCGUGAGAGGC |
| siRNA 2413 | 2413 | CCUCUCACGGGCUAUGAGG | 5437 | CCUCAUAGCCCGUGAGAGG |
| siRNA 2414 | 2414 | CUCUCACGGGCUAUGAGGU | 5438 | ACCUCAUAGCCCGUGAGAG |
| siRNA 2415 | 2415 | UCUCACGGGCUAUGAGGUA | 5439 | UACCUCAUAGCCCGUGAGA |
| siRNA 2416 | 2416 | CUCACGGGCUAUGAGGUAU | 5440 | AUACCUCAUAGCCCGUGAG |
| siRNA 2417 | 2417 | UCACGGGCUAUGAGGUAUG | 5441 | CAUACCUCAUAGCCCGUGA |
| siRNA 2418 | 2418 | CACGGGCUAUGAGGUAUGG | 5442 | CCAUACCUCAUAGCCCGUG |
| siRNA 2419 | 2419 | ACGGGCUAUGAGGUAUGGU | 5443 | ACCAUACCUCAUAGCCCGU |
| siRNA 2420 | 2420 | CGGGCUAUGAGGUAUGGUU | 5444 | AACCAUACCUCAUAGCCCG |
| siRNA 2421 | 2421 | GGGCUAUGAGGUAUGGUUG | 5445 | CAACCAUACCUCAUAGCCC |
| siRNA 2422 | 2422 | GGCUAUGAGGUAUGGUUGG | 5446 | CCAACCAUACCUCAUAGCC |
| siRNA 2423 | 2423 | GCUAUGAGGUAUGGUUGGG | 5447 | CCCAACCAUACCUCAUAGC |
| siRNA 2424 | 2424 | CUAUGAGGUAUGGUUGGGC | 5448 | GCCCAACCAUACCUCAUAG |
| siRNA 2425 | 2425 | UAUGAGGUAUGGUUGGGCA | 5449 | UGCCCAACCAUACCUCAUA |
| siRNA 2426 | 2426 | AUGAGGUAUGGUUGGGCAC | 5450 | GUGCCCAACCAUACCUCAU |
| siRNA 2427 | 2427 | UGAGGUAUGGUUGGGCACC | 5451 | GGUGCCCAACCAUACCUCA |
| siRNA 2428 | 2428 | GAGGUAUGGUUGGGCACCC | 5452 | GGGUGCCCAACCAUACCUC |
| siRNA 2429 | 2429 | AGGUAUGGUUGGGCACCCU | 5453 | AGGGUGCCCAACCAUACCU |
| siRNA 2430 | 2430 | GGUAUGGUUGGGCACCCUG | 5454 | CAGGGUGCCCAACCAUACC |
| siRNA 2431 | 2431 | GUAUGGUUGGGCACCCUGU | 5455 | ACAGGGUGCCCAACCAUAC |
| siRNA 2432 | 2432 | UAUGGUUGGGCACCCUGUU | 5456 | AACAGGGUGCCCAACCAUA |
| siRNA 2433 | 2433 | AUGGUUGGGCACCCUGUUC | 5457 | GAACAGGGUGCCCAACCAU |
| siRNA 2434 | 2434 | UGGUUGGGCACCCUGUUCC | 5458 | GGAACAGGGUGCCCAACCA |
| siRNA 2435 | 2435 | GGUUGGGCACCCUGUUCCA | 5459 | UGGAACAGGGUGCCCAACC |
| siRNA 2436 | 2436 | GUUGGGCACCCUGUUCCAG | 5460 | CUGGAACAGGGUGCCCAAC |
| siRNA 2437 | 2437 | UUGGGCACCCUGUUCCAGA | 5461 | UCUGGAACAGGGUGCCCAA |
| siRNA 2438 | 2438 | UGGGCACCCUGUUCCAGAA | 5462 | UUCUGGAACAGGGUGCCCA |
| siRNA 2439 | 2439 | GGGCACCCUGUUCCAGAAC | 5463 | GUUCUGGAACAGGGUGCCC |
| siRNA 2440 | 2440 | GGCACCCUGUUCCAGAACC | 5464 | GGUUCUGGAACAGGGUGCC |
| siRNA 2441 | 2441 | GCACCCUGUUCCAGAACCC | 5465 | GGGUUCUGGAACAGGGUGC |
| siRNA 2442 | 2442 | CACCCUGUUCCAGAACCCA | 5466 | UGGGUUCUGGAACAGGGUG |
| siRNA 2443 | 2443 | ACCCUGUUCCAGAACCCAC | 5467 | GUGGGUUCUGGAACAGGGU |
| siRNA 2444 | 2444 | CCCUGUUCCAGAACCCACA | 5468 | UGUGGGUUCUGGAACAGGG |
| siRNA 2445 | 2445 | CCUGUUCCAGAACCCACAG | 5469 | CUGUGGGUUCUGGAACAGG |
| siRNA 2446 | 2446 | CUGUUCCAGAACCCACAGC | 5470 | GCUGUGGGUUCUGGAACAG |
| siRNA 2447 | 2447 | UGUUCCAGAACCCACAGCA | 5471 | UGCUGUGGGUUCUGGAACA |
| siRNA 2448 | 2448 | GUUCCAGAACCCACAGCAU | 5472 | AUGCUGUGGGUUCUGGAAC |
| siRNA 2449 | 2449 | UUCCAGAACCCACAGCAUG | 5473 | CAUGCUGUGGGUUCUGGAA |
| siRNA 2450 | 2450 | UCCAGAACCCACAGCAUGG | 5474 | CCAUGCUGUGGGUUCUGGA |
| siRNA 2451 | 2451 | CCAGAACCCACAGCAUGGA | 5475 | UCCAUGCUGUGGGUUCUGG |
| siRNA 2452 | 2452 | CAGAACCCACAGCAUGGAG | 5476 | CUCCAUGCUGUGGGUUCUG |
| siRNA 2453 | 2453 | AGAACCCACAGCAUGGAGA | 5477 | UCUCCAUGCUGUGGGUUCU |
| siRNA 2454 | 2454 | GAACCCACAGCAUGGAGAG | 5478 | CUCUCCAUGCUGUGGGUUC |
| siRNA 2455 | 2455 | AACCCACAGCAUGGAGAGC | 5479 | GCUCUCCAUGCUGUGGGUU |
| siRNA 2456 | 2456 | ACCCACAGCAUGGAGAGCC | 5480 | GGCUCUCCAUGCUGUGGGU |
| siRNA 2457 | 2457 | CCCACAGCAUGGAGAGCCA | 5481 | UGGCUCUCCAUGCUGUGGG |
| siRNA 2458 | 2458 | CCACAGCAUGGAGAGCCAA | 5482 | UUGGCUCUCCAUGCUGUGG |
| siRNA 2459 | 2459 | CACAGCAUGGAGAGCCAAG | 5483 | CUUGGCUCUCCAUGCUGUG |
| siRNA 2460 | 2460 | ACAGCAUGGAGAGCCAAGC | 5484 | GCUUGGCUCUCCAUGCUGU |
| siRNA 2461 | 2461 | CAGCAUGGAGAGCCAAGCC | 5485 | GGCUUGGCUCUCCAUGCUG |
| siRNA 2462 | 2462 | AGCAUGGAGAGCCAAGCCU | 5486 | AGGCUUGGCUCUCCAUGCU |
| siRNA 2463 | 2463 | GCAUGGAGAGCCAAGCCUA | 5487 | UAGGCUUGGCUCUCCAUGC |
| siRNA 2464 | 2464 | CAUGGAGAGCCAAGCCUAC | 5488 | GUAGGCUUGGCUCUCCAUG |
| siRNA 2465 | 2465 | AUGGAGAGCCAAGCCUACA | 5489 | UGUAGGCUUGGCUCUCCAU |
| siRNA 2466 | 2466 | UGGAGAGCCAAGCCUACAG | 5490 | CUGUAGGCUUGGCUCUCCA |
| siRNA 2467 | 2467 | GGAGAGCCAAGCCUACAGC | 5491 | GCUGUAGGCUUGGCUCUCC |
| siRNA 2468 | 2468 | GAGAGCCAAGCCUACAGCG | 5492 | CGCUGUAGGCUUGGCUCUC |
| siRNA 2469 | 2469 | AGAGCCAAGCCUACAGCGG | 5493 | CCGCUGUAGGCUUGGCUCU |
| siRNA 2470 | 2470 | GAGCCAAGCCUACAGCGGG | 5494 | CCCGCUGUAGGCUUGGCUC |
| siRNA 2471 | 2471 | AGCCAAGCCUACAGCGGGU | 5495 | ACCCGCUGUAGGCUUGGCU |
| siRNA 2472 | 2472 | GCCAAGCCUACAGCGGGUC | 5496 | GACCCGCUGUAGGCUUGGC |
| siRNA 2473 | 2473 | CCAAGCCUACAGCGGGUCC | 5497 | GGACCCGCUGUAGGCUUGG |
| siRNA 2474 | 2474 | CAAGCCUACAGCGGGUCCC | 5498 | GGGACCCGCUGUAGGCUUG |
| siRNA 2475 | 2475 | AAGCCUACAGCGGGUCCCA | 5499 | UGGGACCCGCUGUAGGCUU |
| siRNA 2476 | 2476 | AGCCUACAGCGGGUCCCAG | 5500 | CUGGGACCCGCUGUAGGCU |
| siRNA 2477 | 2477 | GCCUACAGCGGGUCCCAGU | 5501 | ACUGGGACCCGCUGUAGGC |
| siRNA 2478 | 2478 | CCUACAGCGGGUCCCAGUA | 5502 | UACUGGGACCCGCUGUAGG |
| siRNA 2479 | 2479 | CUACAGCGGGUCCCAGUAG | 5503 | CUACUGGGACCCGCUGUAG |
| siRNA 2480 | 2480 | UACAGCGGGUCCCAGUAGC | 5504 | GCUACUGGGACCCGCUGUA |
| siRNA 2481 | 2481 | ACAGCGGGUCCCAGUAGCC | 5505 | GGCUACUGGGACCCGCUGU |
| siRNA 2482 | 2482 | CAGCGGGUCCCAGUAGCCA | 5506 | UGGCUACUGGGACCCGCUG |
| siRNA 2483 | 2483 | AGCGGGUCCCAGUAGCCAA | 5507 | UUGGCUACUGGGACCCGCU |
| siRNA 2484 | 2484 | GCGGGUCCCAGUAGCCAAG | 5508 | CUUGGCUACUGGGACCCGC |
| siRNA 2485 | 2485 | CGGGUCCCAGUAGCCAAGA | 5509 | UCUUGGCUACUGGGACCCG |
| siRNA 2486 | 2486 | GGGUCCCAGUAGCCAAGAU | 5510 | AUCUUGGCUACUGGGACCC |
| siRNA 2487 | 2487 | GGUCCCAGUAGCCAAGAUG | 5511 | CAUCUUGGCUACUGGGACC |
| siRNA 2488 | 2488 | GUCCCAGUAGCCAAGAUGG | 5512 | CCAUCUUGGCUACUGGGAC |
| siRNA 2489 | 2489 | UCCCAGUAGCCAAGAUGGU | 5513 | ACCAUCUUGGCUACUGGGA |
| siRNA 2490 | 2490 | CCCAGUAGCCAAGAUGGUG | 5514 | CACCAUCUUGGCUACUGGG |
| siRNA 2491 | 2491 | CCAGUAGCCAAGAUGGUGU | 5515 | ACACCAUCUUGGCUACUGG |
| siRNA 2492 | 2492 | CAGUAGCCAAGAUGGUGUG | 5516 | CACACCAUCUUGGCUACUG |
| siRNA 2493 | 2493 | AGUAGCCAAGAUGGUGUGU | 5517 | ACACACCAUCUUGGCUACU |
| siRNA 2494 | 2494 | GUAGCCAAGAUGGUGUGUG | 5518 | CACACACCAUCUUGGCUAC |
| siRNA 2495 | 2495 | UAGCCAAGAUGGUGUGUGG | 5519 | CCACACACCAUCUUGGCUA |
| siRNA 2496 | 2496 | AGCCAAGAUGGUGUGUGGG | 5520 | CCCACACACCAUCUUGGCU |
| siRNA 2497 | 2497 | GCCAAGAUGGUGUGUGGGC | 5521 | GCCCACACACCAUCUUGGC |
| siRNA 2498 | 2498 | CCAAGAUGGUGUGUGGGCC | 5522 | GGCCCACACACCAUCUUGG |
| siRNA 2499 | 2499 | CAAGAUGGUGUGUGGGCCC | 5523 | GGGCCCACACACCAUCUUG |
| siRNA 2500 | 2500 | AAGAUGGUGUGUGGGCCCU | 5524 | AGGGCCCACACACCAUCUU |
| siRNA 2501 | 2501 | AGAUGGUGUGUGGGCCCUC | 5525 | GAGGGCCCACACACCAUCU |
| siRNA 2502 | 2502 | GAUGGUGUGUGGGCCCUCA | 5526 | UGAGGGCCCACACACCAUC |
| siRNA 2503 | 2503 | AUGGUGUGUGGGCCCUCAG | 5527 | CUGAGGGCCCACACACCAU |
| siRNA 2504 | 2504 | UGGUGUGUGGGCCCUCAGG | 5528 | CCUGAGGGCCCACACACCA |
| siRNA 2505 | 2505 | GGUGUGUGGGCCCUCAGGC | 5529 | GCCUGAGGGCCCACACACC |
| siRNA 2506 | 2506 | GUGUGUGGGCCCUCAGGCU | 5530 | AGCCUGAGGGCCCACACAC |
| siRNA 2507 | 2507 | UGUGUGGGCCCUCAGGCUC | 5531 | GAGCCUGAGGGCCCACACA |
| siRNA 2508 | 2508 | GUGUGGGCCCUCAGGCUCC | 5532 | GGAGCCUGAGGGCCCACAC |
| siRNA 2509 | 2509 | UGUGGGCCCUCAGGCUCCC | 5533 | GGGAGCCUGAGGGCCCACA |
| siRNA 2510 | 2510 | GUGGGCCCUCAGGCUCCCA | 5534 | UGGGAGCCUGAGGGCCCAC |
| siRNA 2511 | 2511 | UGGGCCCUCAGGCUCCCAG | 5535 | CUGGGAGCCUGAGGGCCCA |
| siRNA 2512 | 2512 | GGGCCCUCAGGCUCCCAGC | 5536 | GCUGGGAGCCUGAGGGCCC |
| siRNA 2513 | 2513 | GGCCCUCAGGCUCCCAGCU | 5537 | AGCUGGGAGCCUGAGGGCC |
| siRNA 2514 | 2514 | GCCCUCAGGCUCCCAGCUU | 5538 | AAGCUGGGAGCCUGAGGGC |
| siRNA 2515 | 2515 | CCCUCAGGCUCCCAGCUUG | 5539 | CAAGCUGGGAGCCUGAGGG |
| siRNA 2516 | 2516 | CCUCAGGCUCCCAGCUUGU | 5540 | ACAAGCUGGGAGCCUGAGG |
| siRNA 2517 | 2517 | CUCAGGCUCCCAGCUUGUC | 5541 | GACAAGCUGGGAGCCUGAG |
| siRNA 2518 | 2518 | UCAGGCUCCCAGCUUGUCC | 5542 | GGACAAGCUGGGAGCCUGA |
| siRNA 2519 | 2519 | CAGGCUCCCAGCUUGUCCU | 5543 | AGGACAAGCUGGGAGCCUG |
| siRNA 2520 | 2520 | AGGCUCCCAGCUUGUCCUG | 5544 | CAGGACAAGCUGGGAGCCU |
| siRNA 2521 | 2521 | GGCUCCCAGCUUGUCCUGC | 5545 | GCAGGACAAGCUGGGAGCC |
| siRNA 2522 | 2522 | GCUCCCAGCUUGUCCUGCU | 5546 | AGCAGGACAAGCUGGGAGC |
| siRNA 2523 | 2523 | CUCCCAGCUUGUCCUGCUC | 5547 | GAGCAGGACAAGCUGGGAG |
| siRNA 2524 | 2524 | UCCCAGCUUGUCCUGCUCA | 5548 | UGAGCAGGACAAGCUGGGA |
| siRNA 2525 | 2525 | CCCAGCUUGUCCUGCUCAA | 5549 | UUGAGCAGGACAAGCUGGG |
| siRNA 2526 | 2526 | CCAGCUUGUCCUGCUCAAG | 5550 | CUUGAGCAGGACAAGCUGG |
| siRNA 2527 | 2527 | CAGCUUGUCCUGCUCAAGC | 5551 | GCUUGAGCAGGACAAGCUG |
| siRNA 2528 | 2528 | AGCUUGUCCUGCUCAAGCU | 5552 | AGCUUGAGCAGGACAAGCU |
| siRNA 2529 | 2529 | GCUUGUCCUGCUCAAGCUG | 5553 | CAGCUUGAGCAGGACAAGC |
| siRNA 2530 | 2530 | CUUGUCCUGCUCAAGCUGG | 5554 | CCAGCUUGAGCAGGACAAG |
| siRNA 2531 | 2531 | UUGUCCUGCUCAAGCUGGA | 5555 | UCCAGCUUGAGCAGGACAA |
| siRNA 2532 | 2532 | UGUCCUGCUCAAGCUGGAG | 5556 | CUCCAGCUUGAGCAGGACA |
| siRNA 2533 | 2533 | GUCCUGCUCAAGCUGGAGA | 5557 | UCUCCAGCUUGAGCAGGAC |
| siRNA 2534 | 2534 | UCCUGCUCAAGCUGGAGAG | 5558 | CUCUCCAGCUUGAGCAGGA |
| siRNA 2535 | 2535 | CCUGCUCAAGCUGGAGAGA | 5559 | UCUCUCCAGCUUGAGCAGG |
| siRNA 2536 | 2536 | CUGCUCAAGCUGGAGAGAU | 5560 | AUCUCUCCAGCUUGAGCAG |
| siRNA 2537 | 2537 | UGCUCAAGCUGGAGAGAUC | 5561 | GAUCUCUCCAGCUUGAGCA |
| siRNA 2538 | 2538 | GCUCAAGCUGGAGAGAUCU | 5562 | AGAUCUCUCCAGCUUGAGC |
| siRNA 2539 | 2539 | CUCAAGCUGGAGAGAUCUG | 5563 | CAGAUCUCUCCAGCUUGAG |
| siRNA 2540 | 2540 | UCAAGCUGGAGAGAUCUGU | 5564 | ACAGAUCUCUCCAGCUUGA |
| siRNA 2541 | 2541 | CAAGCUGGAGAGAUCUGUG | 5565 | CACAGAUCUCUCCAGCUUG |
| siRNA 2542 | 2542 | AAGCUGGAGAGAUCUGUGA | 5566 | UCACAGAUCUCUCCAGCUU |
| siRNA 2543 | 2543 | AGCUGGAGAGAUCUGUGAC | 5567 | GUCACAGAUCUCUCCAGCU |
| siRNA 2544 | 2544 | GCUGGAGAGAUCUGUGACC | 5568 | GGUCACAGAUCUCUCCAGC |
| siRNA 2545 | 2545 | CUGGAGAGAUCUGUGACCC | 5569 | GGGUCACAGAUCUCUCCAG |
| siRNA 2546 | 2546 | UGGAGAGAUCUGUGACCCU | 5570 | AGGGUCACAGAUCUCUCCA |
| siRNA 2547 | 2547 | GGAGAGAUCUGUGACCCUG | 5571 | CAGGGUCACAGAUCUCUCC |
| siRNA 2548 | 2548 | GAGAGAUCUGUGACCCUGA | 5572 | UCAGGGUCACAGAUCUCUC |
| siRNA 2549 | 2549 | AGAGAUCUGUGACCCUGAA | 5573 | UUCAGGGUCACAGAUCUCU |
| siRNA 2550 | 2550 | GAGAUCUGUGACCCUGAAC | 5574 | GUUCAGGGUCACAGAUCUC |
| siRNA 2551 | 2551 | AGAUCUGUGACCCUGAACC | 5575 | GGUUCAGGGUCACAGAUCU |
| siRNA 2552 | 2552 | GAUCUGUGACCCUGAACCA | 5576 | UGGUUCAGGGUCACAGAUC |
| siRNA 2553 | 2553 | AUCUGUGACCCUGAACCAG | 5577 | CUGGUUCAGGGUCACAGAU |
| siRNA 2554 | 2554 | UCUGUGACCCUGAACCAGC | 5578 | GCUGGUUCAGGGUCACAGA |
| siRNA 2555 | 2555 | CUGUGACCCUGAACCAGCG | 5579 | CGCUGGUUCAGGGUCACAG |
| siRNA 2556 | 2556 | UGUGACCCUGAACCAGCGU | 5580 | ACGCUGGUUCAGGGUCACA |
| siRNA 2557 | 2557 | GUGACCCUGAACCAGCGUG | 5581 | CACGCUGGUUCAGGGUCAC |
| siRNA 2558 | 2558 | UGACCCUGAACCAGCGUGU | 5582 | ACACGCUGGUUCAGGGUCA |
| siRNA 2559 | 2559 | GACCCUGAACCAGCGUGUG | 5583 | CACACGCUGGUUCAGGGUC |
| siRNA 2560 | 2560 | ACCCUGAACCAGCGUGUGG | 5584 | CCACACGCUGGUUCAGGGU |
| siRNA 2561 | 2561 | CCCUGAACCAGCGUGUGGC | 5585 | GCCACACGCUGGUUCAGGG |
| siRNA 2562 | 2562 | CCUGAACCAGCGUGUGGCC | 5586 | GGCCACACGCUGGUUCAGG |
| siRNA 2563 | 2563 | CUGAACCAGCGUGUGGCCC | 5587 | GGGCCACACGCUGGUUCAG |
| siRNA 2564 | 2564 | UGAACCAGCGUGUGGCCCU | 5588 | AGGGCCACACGCUGGUUCA |
| siRNA 2565 | 2565 | GAACCAGCGUGUGGCCCUG | 5589 | CAGGGCCACACGCUGGUUC |
| siRNA 2566 | 2566 | AACCAGCGUGUGGCCCUGA | 5590 | UCAGGGCCACACGCUGGUU |
| siRNA 2567 | 2567 | ACCAGCGUGUGGCCCUGAU | 5591 | AUCAGGGCCACACGCUGGU |
| siRNA 2568 | 2568 | CCAGCGUGUGGCCCUGAUC | 5592 | GAUCAGGGCCACACGCUGG |
| siRNA 2569 | 2569 | CAGCGUGUGGCCCUGAUCU | 5593 | AGAUCAGGGCCACACGCUG |
| siRNA 2570 | 2570 | AGCGUGUGGCCCUGAUCUG | 5594 | CAGAUCAGGGCCACACGCU |
| siRNA 2571 | 2571 | GCGUGUGGCCCUGAUCUGC | 5595 | GCAGAUCAGGGCCACACGC |
| siRNA 2572 | 2572 | CGUGUGGCCCUGAUCUGCC | 5596 | GGCAGAUCAGGGCCACACG |
| siRNA 2573 | 2573 | GUGUGGCCCUGAUCUGCCU | 5597 | AGGCAGAUCAGGGCCACAC |
| siRNA 2574 | 2574 | UGUGGCCCUGAUCUGCCUG | 5598 | CAGGCAGAUCAGGGCCACA |
| siRNA 2575 | 2575 | GUGGCCCUGAUCUGCCUGC | 5599 | GCAGGCAGAUCAGGGCCAC |
| siRNA 2576 | 2576 | UGGCCCUGAUCUGCCUGCC | 5600 | GGCAGGCAGAUCAGGGCCA |
| siRNA 2577 | 2577 | GGCCCUGAUCUGCCUGCCC | 5601 | GGGCAGGCAGAUCAGGGCC |
| siRNA 2578 | 2578 | GCCCUGAUCUGCCUGCCCC | 5602 | GGGGCAGGCAGAUCAGGGC |
| siRNA 2579 | 2579 | CCCUGAUCUGCCUGCCCCC | 5603 | GGGGGCAGGCAGAUCAGGG |
| siRNA 2580 | 2580 | CCUGAUCUGCCUGCCCCCU | 5604 | AGGGGGCAGGCAGAUCAGG |
| siRNA 2581 | 2581 | CUGAUCUGCCUGCCCCCUG | 5605 | CAGGGGGCAGGCAGAUCAG |
| siRNA 2582 | 2582 | UGAUCUGCCUGCCCCCUGA | 5606 | UCAGGGGGCAGGCAGAUCA |
| siRNA 2583 | 2583 | GAUCUGCCUGCCCCCUGAA | 5607 | UUCAGGGGGCAGGCAGAUC |
| siRNA 2584 | 2584 | AUCUGCCUGCCCCCUGAAU | 5608 | AUUCAGGGGGCAGGCAGAU |
| siRNA 2585 | 2585 | UCUGCCUGCCCCCUGAAUG | 5609 | CAUUCAGGGGGCAGGCAGA |
| siRNA 2586 | 2586 | CUGCCUGCCCCCUGAAUGG | 5610 | CCAUUCAGGGGGCAGGCAG |
| siRNA 2587 | 2587 | UGCCUGCCCCCUGAAUGGU | 5611 | ACCAUUCAGGGGGCAGGCA |
| siRNA 2588 | 2588 | GCCUGCCCCCUGAAUGGUA | 5612 | UACCAUUCAGGGGGCAGGC |
| siRNA 2589 | 2589 | CCUGCCCCCUGAAUGGUAU | 5613 | AUACCAUUCAGGGGGCAGG |
| siRNA 2590 | 2590 | CUGCCCCCUGAAUGGUAUG | 5614 | CAUACCAUUCAGGGGGCAG |
| siRNA 2591 | 2591 | UGCCCCCUGAAUGGUAUGU | 5615 | ACAUACCAUUCAGGGGGCA |
| siRNA 2592 | 2592 | GCCCCCUGAAUGGUAUGUG | 5616 | CACAUACCAUUCAGGGGGC |
| siRNA 2593 | 2593 | CCCCCUGAAUGGUAUGUGG | 5617 | CCACAUACCAUUCAGGGGG |
| siRNA 2594 | 2594 | CCCCUGAAUGGUAUGUGGU | 5618 | ACCACAUACCAUUCAGGGG |
| siRNA 2595 | 2595 | CCCUGAAUGGUAUGUGGUG | 5619 | CACCACAUACCAUUCAGGG |
| siRNA 2596 | 2596 | CCUGAAUGGUAUGUGGUGC | 5620 | GCACCACAUACCAUUCAGG |
| siRNA 2597 | 2597 | CUGAAUGGUAUGUGGUGCC | 5621 | GGCACCACAUACCAUUCAG |
| siRNA 2598 | 2598 | UGAAUGGUAUGUGGUGCCU | 5622 | AGGCACCACAUACCAUUCA |
| siRNA 2599 | 2599 | GAAUGGUAUGUGGUGCCUC | 5623 | GAGGCACCACAUACCAUUC |
| siRNA 2600 | 2600 | AAUGGUAUGUGGUGCCUCC | 5624 | GGAGGCACCACAUACCAUU |
| siRNA 2601 | 2601 | AUGGUAUGUGGUGCCUCCA | 5625 | UGGAGGCACCACAUACCAU |
| siRNA 2602 | 2602 | UGGUAUGUGGUGCCUCCAG | 5626 | CUGGAGGCACCACAUACCA |
| siRNA 2603 | 2603 | GGUAUGUGGUGCCUCCAGG | 5627 | CCUGGAGGCACCACAUACC |
| siRNA 2604 | 2604 | GUAUGUGGUGCCUCCAGGG | 5628 | CCCUGGAGGCACCACAUAC |
| siRNA 2605 | 2605 | UAUGUGGUGCCUCCAGGGA | 5629 | UCCCUGGAGGCACCACAUA |
| siRNA 2606 | 2606 | AUGUGGUGCCUCCAGGGAC | 5630 | GUCCCUGGAGGCACCACAU |
| siRNA 2607 | 2607 | UGUGGUGCCUCCAGGGACC | 5631 | GGUCCCUGGAGGCACCACA |
| siRNA 2608 | 2608 | GUGGUGCCUCCAGGGACCA | 5632 | UGGUCCCUGGAGGCACCAC |
| siRNA 2609 | 2609 | UGGUGCCUCCAGGGACCAA | 5633 | UUGGUCCCUGGAGGCACCA |
| siRNA 2610 | 2610 | GGUGCCUCCAGGGACCAAG | 5634 | CUUGGUCCCUGGAGGCACC |
| siRNA 2611 | 2611 | GUGCCUCCAGGGACCAAGU | 5635 | ACUUGGUCCCUGGAGGCAC |
| siRNA 2612 | 2612 | UGCCUCCAGGGACCAAGUG | 5636 | CACUUGGUCCCUGGAGGCA |
| siRNA 2613 | 2613 | GCCUCCAGGGACCAAGUGU | 5637 | ACACUUGGUCCCUGGAGGC |
| siRNA 2614 | 2614 | CCUCCAGGGACCAAGUGUG | 5638 | CACACUUGGUCCCUGGAGG |
| siRNA 2615 | 2615 | CUCCAGGGACCAAGUGUGA | 5639 | UCACACUUGGUCCCUGGAG |
| siRNA 2616 | 2616 | UCCAGGGACCAAGUGUGAG | 5640 | CUCACACUUGGUCCCUGGA |
| siRNA 2617 | 2617 | CCAGGGACCAAGUGUGAGA | 5641 | UCUCACACUUGGUCCCUGG |
| siRNA 2618 | 2618 | CAGGGACCAAGUGUGAGAU | 5642 | AUCUCACACUUGGUCCCUG |
| siRNA 2619 | 2619 | AGGGACCAAGUGUGAGAUU | 5643 | AAUCUCACACUUGGUCCCU |
| siRNA 2620 | 2620 | GGGACCAAGUGUGAGAUUG | 5644 | CAAUCUCACACUUGGUCCC |
| siRNA 2621 | 2621 | GGACCAAGUGUGAGAUUGC | 5645 | GCAAUCUCACACUUGGUCC |
| siRNA 2622 | 2622 | GACCAAGUGUGAGAUUGCA | 5646 | UGCAAUCUCACACUUGGUC |
| siRNA 2623 | 2623 | ACCAAGUGUGAGAUUGCAG | 5647 | CUGCAAUCUCACACUUGGU |
| siRNA 2624 | 2624 | CCAAGUGUGAGAUUGCAGG | 5648 | CCUGCAAUCUCACACUUGG |
| siRNA 2625 | 2625 | CAAGUGUGAGAUUGCAGGC | 5649 | GCCUGCAAUCUCACACUUG |
| siRNA 2626 | 2626 | AAGUGUGAGAUUGCAGGCU | 5650 | AGCCUGCAAUCUCACACUU |
| siRNA 2627 | 2627 | AGUGUGAGAUUGCAGGCUG | 5651 | CAGCCUGCAAUCUCACACU |
| siRNA 2628 | 2628 | GUGUGAGAUUGCAGGCUGG | 5652 | CCAGCCUGCAAUCUCACAC |
| siRNA 2629 | 2629 | UGUGAGAUUGCAGGCUGGG | 5653 | CCCAGCCUGCAAUCUCACA |
| siRNA 2630 | 2630 | GUGAGAUUGCAGGCUGGGG | 5654 | CCCCAGCCUGCAAUCUCAC |
| siRNA 2631 | 2631 | UGAGAUUGCAGGCUGGGGU | 5655 | ACCCCAGCCUGCAAUCUCA |
| siRNA 2632 | 2632 | GAGAUUGCAGGCUGGGGUG | 5656 | CACCCCAGCCUGCAAUCUC |
| siRNA 2633 | 2633 | AGAUUGCAGGCUGGGGUGA | 5657 | UCACCCCAGCCUGCAAUCU |
| siRNA 2634 | 2634 | GAUUGCAGGCUGGGGUGAG | 5658 | CUCACCCCAGCCUGCAAUC |
| siRNA 2635 | 2635 | AUUGCAGGCUGGGGUGAGA | 5659 | UCUCACCCCAGCCUGCAAU |
| siRNA 2636 | 2636 | UUGCAGGCUGGGGUGAGAC | 5660 | GUCUCACCCCAGCCUGCAA |
| siRNA 2637 | 2637 | UGCAGGCUGGGGUGAGACC | 5661 | GGUCUCACCCCAGCCUGCA |
| siRNA 2638 | 2638 | GCAGGCUGGGGUGAGACCA | 5662 | UGGUCUCACCCCAGCCUGC |
| siRNA 2639 | 2639 | CAGGCUGGGGUGAGACCAA | 5663 | UUGGUCUCACCCCAGCCUG |
| siRNA 2640 | 2640 | AGGCUGGGGUGAGACCAAA | 5664 | UUUGGUCUCACCCCAGCCU |
| siRNA 2641 | 2641 | GGCUGGGGUGAGACCAAAG | 5665 | CUUUGGUCUCACCCCAGCC |
| siRNA 2642 | 2642 | GCUGGGGUGAGACCAAAGG | 5666 | CCUUUGGUCUCACCCCAGC |
| siRNA 2643 | 2643 | CUGGGGUGAGACCAAAGGU | 5667 | ACCUUUGGUCUCACCCCAG |
| siRNA 2644 | 2644 | UGGGGUGAGACCAAAGGUA | 5668 | UACCUUUGGUCUCACCCCA |
| siRNA 2645 | 2645 | GGGGUGAGACCAAAGGUAC | 5669 | GUACCUUUGGUCUCACCCC |
| siRNA 2646 | 2646 | GGGUGAGACCAAAGGUACG | 5670 | CGUACCUUUGGUCUCACCC |
| siRNA 2647 | 2647 | GGUGAGACCAAAGGUACGG | 5671 | CCGUACCUUUGGUCUCACC |
| siRNA 2648 | 2648 | GUGAGACCAAAGGUACGGG | 5672 | CCCGUACCUUUGGUCUCAC |
| siRNA 2649 | 2649 | UGAGACCAAAGGUACGGGU | 5673 | ACCCGUACCUUUGGUCUCA |
| siRNA 2650 | 2650 | GAGACCAAAGGUACGGGUA | 5674 | UACCCGUACCUUUGGUCUC |
| siRNA 2651 | 2651 | AGACCAAAGGUACGGGUAA | 5675 | UUACCCGUACCUUUGGUCU |
| siRNA 2652 | 2652 | GACCAAAGGUACGGGUAAU | 5676 | AUUACCCGUACCUUUGGUC |
| siRNA 2653 | 2653 | ACCAAAGGUACGGGUAAUG | 5677 | CAUUACCCGUACCUUUGGU |
| siRNA 2654 | 2654 | CCAAAGGUACGGGUAAUGA | 5678 | UCAUUACCCGUACCUUUGG |
| siRNA 2655 | 2655 | CAAAGGUACGGGUAAUGAC | 5679 | GUCAUUACCCGUACCUUUG |
| siRNA 2656 | 2656 | AAAGGUACGGGUAAUGACA | 5680 | UGUCAUUACCCGUACCUUU |
| siRNA 2657 | 2657 | AAGGUACGGGUAAUGACAC | 5681 | GUGUCAUUACCCGUACCUU |
| siRNA 2658 | 2658 | AGGUACGGGUAAUGACACA | 5682 | UGUGUCAUUACCCGUACCU |
| siRNA 2659 | 2659 | GGUACGGGUAAUGACACAG | 5683 | CUGUGUCAUUACCCGUACC |
| siRNA 2660 | 2660 | GUACGGGUAAUGACACAGU | 5684 | ACUGUGUCAUUACCCGUAC |
| siRNA 2661 | 2661 | UACGGGUAAUGACACAGUC | 5685 | GACUGUGUCAUUACCCGUA |
| siRNA 2662 | 2662 | ACGGGUAAUGACACAGUCC | 5686 | GGACUGUGUCAUUACCCGU |
| siRNA 2663 | 2663 | CGGGUAAUGACACAGUCCU | 5687 | AGGACUGUGUCAUUACCCG |
| siRNA 2664 | 2664 | GGGUAAUGACACAGUCCUA | 5688 | UAGGACUGUGUCAUUACCC |
| siRNA 2665 | 2665 | GGUAAUGACACAGUCCUAA | 5689 | UUAGGACUGUGUCAUUACC |
| siRNA 2666 | 2666 | GUAAUGACACAGUCCUAAA | 5690 | UUUAGGACUGUGUCAUUAC |
| siRNA 2667 | 2667 | UAAUGACACAGUCCUAAAU | 5691 | AUUUAGGACUGUGUCAUUA |
| siRNA 2668 | 2668 | AAUGACACAGUCCUAAAUG | 5692 | CAUUUAGGACUGUGUCAUU |
| siRNA 2669 | 2669 | AUGACACAGUCCUAAAUGU | 5693 | ACAUUUAGGACUGUGUCAU |
| siRNA 2670 | 2670 | UGACACAGUCCUAAAUGUG | 5694 | CACAUUUAGGACUGUGUCA |
| siRNA 2671 | 2671 | GACACAGUCCUAAAUGUGG | 5695 | CCACAUUUAGGACUGUGUC |
| siRNA 2672 | 2672 | ACACAGUCCUAAAUGUGGC | 5696 | GCCACAUUUAGGACUGUGU |
| siRNA 2673 | 2673 | CACAGUCCUAAAUGUGGCC | 5697 | GGCCACAUUUAGGACUGUG |
| siRNA 2674 | 2674 | ACAGUCCUAAAUGUGGCCU | 5698 | AGGCCACAUUUAGGACUGU |
| siRNA 2675 | 2675 | CAGUCCUAAAUGUGGCCUU | 5699 | AAGGCCACAUUUAGGACUG |
| siRNA 2676 | 2676 | AGUCCUAAAUGUGGCCUUG | 5700 | CAAGGCCACAUUUAGGACU |
| siRNA 2677 | 2677 | GUCCUAAAUGUGGCCUUGC | 5701 | GCAAGGCCACAUUUAGGAC |
| siRNA 2678 | 2678 | UCCUAAAUGUGGCCUUGCU | 5702 | AGCAAGGCCACAUUUAGGA |
| siRNA 2679 | 2679 | CCUAAAUGUGGCCUUGCUG | 5703 | CAGCAAGGCCACAUUUAGG |
| siRNA 2680 | 2680 | CUAAAUGUGGCCUUGCUGA | 5704 | UCAGCAAGGCCACAUUUAG |
| siRNA 2681 | 2681 | UAAAUGUGGCCUUGCUGAA | 5705 | UUCAGCAAGGCCACAUUUA |
| siRNA 2682 | 2682 | AAAUGUGGCCUUGCUGAAU | 5706 | AUUCAGCAAGGCCACAUUU |
| siRNA 2683 | 2683 | AAUGUGGCCUUGCUGAAUG | 5707 | CAUUCAGCAAGGCCACAUU |
| siRNA 2684 | 2684 | AUGUGGCCUUGCUGAAUGU | 5708 | ACAUUCAGCAAGGCCACAU |
| siRNA 2685 | 2685 | UGUGGCCUUGCUGAAUGUC | 5709 | GACAUUCAGCAAGGCCACA |
| siRNA 2686 | 2686 | GUGGCCUUGCUGAAUGUCA | 5710 | UGACAUUCAGCAAGGCCAC |
| siRNA 2687 | 2687 | UGGCCUUGCUGAAUGUCAU | 5711 | AUGACAUUCAGCAAGGCCA |
| siRNA 2688 | 2688 | GGCCUUGCUGAAUGUCAUC | 5712 | GAUGACAUUCAGCAAGGCC |
| siRNA 2689 | 2689 | GCCUUGCUGAAUGUCAUCU | 5713 | AGAUGACAUUCAGCAAGGC |
| siRNA 2690 | 2690 | CCUUGCUGAAUGUCAUCUC | 5714 | GAGAUGACAUUCAGCAAGG |
| siRNA 2691 | 2691 | CUUGCUGAAUGUCAUCUCC | 5715 | GGAGAUGACAUUCAGCAAG |
| siRNA 2692 | 2692 | UUGCUGAAUGUCAUCUCCA | 5716 | UGGAGAUGACAUUCAGCAA |
| siRNA 2693 | 2693 | UGCUGAAUGUCAUCUCCAA | 5717 | UUGGAGAUGACAUUCAGCA |
| siRNA 2694 | 2694 | GCUGAAUGUCAUCUCCAAC | 5718 | GUUGGAGAUGACAUUCAGC |
| siRNA 2695 | 2695 | CUGAAUGUCAUCUCCAACC | 5719 | GGUUGGAGAUGACAUUCAG |
| siRNA 2696 | 2696 | UGAAUGUCAUCUCCAACCA | 5720 | UGGUUGGAGAUGACAUUCA |
| siRNA 2697 | 2697 | GAAUGUCAUCUCCAACCAG | 5721 | CUGGUUGGAGAUGACAUUC |
| siRNA 2698 | 2698 | AAUGUCAUCUCCAACCAGG | 5722 | CCUGGUUGGAGAUGACAUU |
| siRNA 2699 | 2699 | AUGUCAUCUCCAACCAGGA | 5723 | UCCUGGUUGGAGAUGACAU |
| siRNA 2700 | 2700 | UGUCAUCUCCAACCAGGAG | 5724 | CUCCUGGUUGGAGAUGACA |
| siRNA 2701 | 2701 | GUCAUCUCCAACCAGGAGU | 5725 | ACUCCUGGUUGGAGAUGAC |
| siRNA 2702 | 2702 | UCAUCUCCAACCAGGAGUG | 5726 | CACUCCUGGUUGGAGAUGA |
| siRNA 2703 | 2703 | CAUCUCCAACCAGGAGUGU | 5727 | ACACUCCUGGUUGGAGAUG |
| siRNA 2704 | 2704 | AUCUCCAACCAGGAGUGUA | 5728 | UACACUCCUGGUUGGAGAU |
| siRNA 2705 | 2705 | UCUCCAACCAGGAGUGUAA | 5729 | UUACACUCCUGGUUGGAGA |
| siRNA 2706 | 2706 | CUCCAACCAGGAGUGUAAC | 5730 | GUUACACUCCUGGUUGGAG |
| siRNA 2707 | 2707 | UCCAACCAGGAGUGUAACA | 5731 | UGUUACACUCCUGGUUGGA |
| siRNA 2708 | 2708 | CCAACCAGGAGUGUAACAU | 5732 | AUGUUACACUCCUGGUUGG |
| siRNA 2709 | 2709 | CAACCAGGAGUGUAACAUC | 5733 | GAUGUUACACUCCUGGUUG |
| siRNA 2710 | 2710 | AACCAGGAGUGUAACAUCA | 5734 | UGAUGUUACACUCCUGGUU |
| siRNA 2711 | 2711 | ACCAGGAGUGUAACAUCAA | 5735 | UUGAUGUUACACUCCUGGU |
| siRNA 2712 | 2712 | CCAGGAGUGUAACAUCAAG | 5736 | CUUGAUGUUACACUCCUGG |
| siRNA 2713 | 2713 | CAGGAGUGUAACAUCAAGC | 5737 | GCUUGAUGUUACACUCCUG |
| SiRNA 2714 | 2714 | AGGAGUGUAACAUCAAGCA | 5738 | UGCUUGAUGUUACACUCCU |
| siRNA 2715 | 2715 | GGAGUGUAACAUCAAGCAC | 5739 | GUGCUUGAUGUUACACUCC |
| siRNA 2716 | 2716 | GAGUGUAACAUCAAGCACC | 5740 | GGUGCUUGAUGUUACACUC |
| siRNA 2717 | 2717 | AGUGUAACAUCAAGCACCG | 5741 | CGGUGCUUGAUGUUACACU |
| siRNA 2718 | 2718 | GUGUAACAUCAAGCACCGA | 5742 | UCGGUGCUUGAUGUUACAC |
| siRNA 2719 | 2719 | UGUAACAUCAAGCACCGAG | 5743 | CUCGGUGCUUGAUGUUACA |
| siRNA 2720 | 2720 | GUAACAUCAAGCACCGAGG | 5744 | CCUCGGUGCUUGAUGUUAC |
| siRNA 2721 | 2721 | UAACAUCAAGCACCGAGGA | 5745 | UCCUCGGUGCUUGAUGUUA |
| siRNA 2722 | 2722 | AACAUCAAGCACCGAGGAC | 5746 | GUCCUCGGUGCUUGAUGUU |
| siRNA 2723 | 2723 | ACAUCAAGCACCGAGGACG | 5747 | CGUCCUCGGUGCUUGAUGU |
| siRNA 2724 | 2724 | CAUCAAGCACCGAGGACGU | 5748 | ACGUCCUCGGUGCUUGAUG |
| siRNA 2725 | 2725 | AUCAAGCACCGAGGACGUG | 5749 | CACGUCCUCGGUGCUUGAU |
| siRNA 2726 | 2726 | UCAAGCACCGAGGACGUGU | 5750 | ACACGUCCUCGGUGCUUGA |
| siRNA 2727 | 2727 | CAAGCACCGAGGACGUGUG | 5751 | CACACGUCCUCGGUGCUUG |
| siRNA 2728 | 2728 | AAGCACCGAGGACGUGUGC | 5752 | GCACACGUCCUCGGUGCUU |
| siRNA 2729 | 2729 | AGCACCGAGGACGUGUGCG | 5753 | CGCACACGUCCUCGGUGCU |
| siRNA 2730 | 2730 | GCACCGAGGACGUGUGCGG | 5754 | CCGCACACGUCCUCGGUGC |
| siRNA 2731 | 2731 | CACCGAGGACGUGUGCGGG | 5755 | CCCGCACACGUCCUCGGUG |
| siRNA 2732 | 2732 | ACCGAGGACGUGUGCGGGA | 5756 | UCCCGCACACGUCCUCGGU |
| siRNA 2733 | 2733 | CCGAGGACGUGUGCGGGAG | 5757 | CUCCCGCACACGUCCUCGG |
| siRNA 2734 | 2734 | CGAGGACGUGUGCGGGAGA | 5758 | UCUCCCGCACACGUCCUCG |
| siRNA 2735 | 2735 | GAGGACGUGUGCGGGAGAG | 5759 | CUCUCCCGCACACGUCCUC |
| siRNA 2736 | 2736 | AGGACGUGUGCGGGAGAGU | 5760 | ACUCUCCCGCACACGUCCU |
| siRNA 2737 | 2737 | GGACGUGUGCGGGAGAGUG | 5761 | CACUCUCCCGCACACGUCC |
| siRNA 2738 | 2738 | GACGUGUGCGGGAGAGUGA | 5762 | UCACUCUCCCGCACACGUC |
| siRNA 2739 | 2739 | ACGUGUGCGGGAGAGUGAG | 5763 | CUCACUCUCCCGCACACGU |
| siRNA 2740 | 2740 | CGUGUGCGGGAGAGUGAGA | 5764 | UCUCACUCUCCCGCACACG |
| siRNA 2741 | 2741 | GUGUGCGGGAGAGUGAGAU | 5765 | AUCUCACUCUCCCGCACAC |
| siRNA 2742 | 2742 | UGUGCGGGAGAGUGAGAUG | 5766 | CAUCUCACUCUCCCGCACA |
| siRNA 2743 | 2743 | GUGCGGGAGAGUGAGAUGU | 5767 | ACAUCUCACUCUCCCGCAC |
| siRNA 2744 | 2744 | UGCGGGAGAGUGAGAUGUG | 5768 | CACAUCUCACUCUCCCGCA |
| siRNA 2745 | 2745 | GCGGGAGAGUGAGAUGUGC | 5769 | GCACAUCUCACUCUCCCGC |
| siRNA 2746 | 2746 | CGGGAGAGUGAGAUGUGCA | 5770 | UGCACAUCUCACUCUCCCG |
| siRNA 2747 | 2747 | GGGAGAGUGAGAUGUGCAC | 5771 | GUGCACAUCUCACUCUCCC |
| siRNA 2748 | 2748 | GGAGAGUGAGAUGUGCACU | 5772 | AGUGCACAUCUCACUCUCC |
| siRNA 2749 | 2749 | GAGAGUGAGAUGUGCACUG | 5773 | CAGUGCACAUCUCACUCUC |
| siRNA 2750 | 2750 | AGAGUGAGAUGUGCACUGA | 5774 | UCAGUGCACAUCUCACUCU |
| siRNA 2751 | 2751 | GAGUGAGAUGUGCACUGAG | 5775 | CUCAGUGCACAUCUCACUC |
| siRNA 2752 | 2752 | AGUGAGAUGUGCACUGAGG | 5776 | CCUCAGUGCACAUCUCACU |
| siRNA 2753 | 2753 | GUGAGAUGUGCACUGAGGG | 5777 | CCCUCAGUGCACAUCUCAC |
| siRNA 2754 | 2754 | UGAGAUGUGCACUGAGGGA | 5778 | UCCCUCAGUGCACAUCUCA |
| siRNA 2755 | 2755 | GAGAUGUGCACUGAGGGAC | 5779 | GUCCCUCAGUGCACAUCUC |
| siRNA 2756 | 2756 | AGAUGUGCACUGAGGGACU | 5780 | AGUCCCUCAGUGCACAUCU |
| siRNA 2757 | 2757 | GAUGUGCACUGAGGGACUG | 5781 | CAGUCCCUCAGUGCACAUC |
| siRNA 2758 | 2758 | AUGUGCACUGAGGGACUGU | 5782 | ACAGUCCCUCAGUGCACAU |
| siRNA 2759 | 2759 | UGUGCACUGAGGGACUGUU | 5783 | AACAGUCCCUCAGUGCACA |
| siRNA 2760 | 2760 | GUGCACUGAGGGACUGUUG | 5784 | CAACAGUCCCUCAGUGCAC |
| siRNA 2761 | 2761 | UGCACUGAGGGACUGUUGG | 5785 | CCAACAGUCCCUCAGUGCA |
| siRNA 2762 | 2762 | GCACUGAGGGACUGUUGGC | 5786 | GCCAACAGUCCCUCAGUGC |
| siRNA 2763 | 2763 | CACUGAGGGACUGUUGGCC | 5787 | GGCCAACAGUCCCUCAGUG |
| siRNA 2764 | 2764 | ACUGAGGGACUGUUGGCCC | 5788 | GGGCCAACAGUCCCUCAGU |
| siRNA 2765 | 2765 | CUGAGGGACUGUUGGCCCC | 5789 | GGGGCCAACAGUCCCUCAG |
| siRNA 2766 | 2766 | UGAGGGACUGUUGGCCCCU | 5790 | AGGGGCCAACAGUCCCUCA |
| siRNA 2767 | 2767 | GAGGGACUGUUGGCCCCUG | 5791 | CAGGGGCCAACAGUCCCUC |
| siRNA 2768 | 2768 | AGGGACUGUUGGCCCCUGU | 5792 | ACAGGGGCCAACAGUCCCU |
| siRNA 2769 | 2769 | GGGACUGUUGGCCCCUGUG | 5793 | CACAGGGGCCAACAGUCCC |
| siRNA 2770 | 2770 | GGACUGUUGGCCCCUGUGG | 5794 | CCACAGGGGCCAACAGUCC |
| siRNA 2771 | 2771 | GACUGUUGGCCCCUGUGGG | 5795 | CCCACAGGGGCCAACAGUC |
| siRNA 2772 | 2772 | ACUGUUGGCCCCUGUGGGG | 5796 | CCCCACAGGGGCCAACAGU |
| siRNA 2773 | 2773 | CUGUUGGCCCCUGUGGGGG | 5797 | CCCCCACAGGGGCCAACAG |
| siRNA 2774 | 2774 | UGUUGGCCCCUGUGGGGGC | 5798 | GCCCCCACAGGGGCCAACA |
| siRNA 2775 | 2775 | GUUGGCCCCUGUGGGGGCC | 5799 | GGCCCCCACAGGGGCCAAC |
| siRNA 2776 | 2776 | UUGGCCCCUGUGGGGGCCU | 5800 | AGGCCCCCACAGGGGCCAA |
| siRNA 2777 | 2777 | UGGCCCCUGUGGGGGCCUG | 5801 | CAGGCCCCCACAGGGGCCA |
| siRNA 2778 | 2778 | GGCCCCUGUGGGGGCCUGU | 5802 | ACAGGCCCCCACAGGGGCC |
| siRNA 2779 | 2779 | GCCCCUGUGGGGGCCUGUG | 5803 | CACAGGCCCCCACAGGGGC |
| siRNA 2780 | 2780 | CCCCUGUGGGGGCCUGUGA | 5804 | UCACAGGCCCCCACAGGGG |
| SiRNA 2781 | 2781 | CCCUGUGGGGGCCUGUGAG | 5805 | CUCACAGGCCCCCACAGGG |
| siRNA 2782 | 2782 | CCUGUGGGGGCCUGUGAGG | 5806 | CCUCACAGGCCCCCACAGG |
| siRNA 2783 | 2783 | CUGUGGGGGCCUGUGAGGG | 5807 | CCCUCACAGGCCCCCACAG |
| siRNA 2784 | 2784 | UGUGGGGGCCUGUGAGGGU | 5808 | ACCCUCACAGGCCCCCACA |
| siRNA 2785 | 2785 | GUGGGGGCCUGUGAGGGUG | 5809 | CACCCUCACAGGCCCCCAC |
| siRNA 2786 | 2786 | UGGGGGCCUGUGAGGGUGA | 5810 | UCACCCUCACAGGCCCCCA |
| siRNA 2787 | 2787 | GGGGGCCUGUGAGGGUGAC | 5811 | GUCACCCUCACAGGCCCCC |
| siRNA 2788 | 2788 | GGGGCCUGUGAGGGUGACU | 5812 | AGUCACCCUCACAGGCCCC |
| siRNA 2789 | 2789 | GGGCCUGUGAGGGUGACUA | 5813 | UAGUCACCCUCACAGGCCC |
| siRNA 2790 | 2790 | GGCCUGUGAGGGUGACUAC | 5814 | GUAGUCACCCUCACAGGCC |
| siRNA 2791 | 2791 | GCCUGUGAGGGUGACUACG | 5815 | CGUAGUCACCCUCACAGGC |
| siRNA 2792 | 2792 | CCUGUGAGGGUGACUACGG | 5816 | CCGUAGUCACCCUCACAGG |
| siRNA 2793 | 2793 | CUGUGAGGGUGACUACGGG | 5817 | CCCGUAGUCACCCUCACAG |
| siRNA 2794 | 2794 | UGUGAGGGUGACUACGGGG | 5818 | CCCCGUAGUCACCCUCACA |
| siRNA 2795 | 2795 | GUGAGGGUGACUACGGGGG | 5819 | CCCCCGUAGUCACCCUCAC |
| siRNA 2796 | 2796 | UGAGGGUGACUACGGGGGC | 5820 | GCCCCCGUAGUCACCCUCA |
| siRNA 2797 | 2797 | GAGGGUGACUACGGGGGCC | 5821 | GGCCCCCGUAGUCACCCUC |
| siRNA 2798 | 2798 | AGGGUGACUACGGGGGCCC | 5822 | GGGCCCCCGUAGUCACCCU |
| siRNA 2799 | 2799 | GGGUGACUACGGGGGCCCA | 5823 | UGGGCCCCCGUAGUCACCC |
| siRNA 2800 | 2800 | GGUGACUACGGGGGCCCAC | 5824 | GUGGGCCCCCGUAGUCACC |
| siRNA 2801 | 2801 | GUGACUACGGGGGCCCACU | 5825 | AGUGGGCCCCCGUAGUCAC |
| siRNA 2802 | 2802 | UGACUACGGGGGCCCACUU | 5826 | AAGUGGGCCCCCGUAGUCA |
| siRNA 2803 | 2803 | GACUACGGGGGCCCACUUG | 5827 | CAAGUGGGCCCCCGUAGUC |
| siRNA 2804 | 2804 | ACUACGGGGGCCCACUUGC | 5828 | GCAAGUGGGCCCCCGUAGU |
| siRNA 2805 | 2805 | CUACGGGGGCCCACUUGCC | 5829 | GGCAAGUGGGCCCCCGUAG |
| siRNA 2806 | 2806 | UACGGGGGCCCACUUGCCU | 5830 | AGGCAAGUGGGCCCCCGUA |
| siRNA 2807 | 2807 | ACGGGGGCCCACUUGCCUG | 5831 | CAGGCAAGUGGGCCCCCGU |
| siRNA 2808 | 2808 | CGGGGGCCCACUUGCCUGC | 5832 | GCAGGCAAGUGGGCCCCCG |
| siRNA 2809 | 2809 | GGGGGCCCACUUGCCUGCU | 5833 | AGCAGGCAAGUGGGCCCCC |
| siRNA 2810 | 2810 | GGGGCCCACUUGCCUGCUU | 5834 | AAGCAGGCAAGUGGGCCCC |
| siRNA 2811 | 2811 | GGGCCCACUUGCCUGCUUU | 5835 | AAAGCAGGCAAGUGGGCCC |
| siRNA 2812 | 2812 | GGCCCACUUGCCUGCUUUA | 5836 | UAAAGCAGGCAAGUGGGCC |
| siRNA 2813 | 2813 | GCCCACUUGCCUGCUUUAC | 5837 | GUAAAGCAGGCAAGUGGGC |
| siRNA 2814 | 2814 | CCCACUUGCCUGCUUUACC | 5838 | GGUAAAGCAGGCAAGUGGG |
| siRNA 2815 | 2815 | CCACUUGCCUGCUUUACCC | 5839 | GGGUAAAGCAGGCAAGUGG |
| siRNA 2816 | 2816 | CACUUGCCUGCUUUACCCA | 5840 | UGGGUAAAGCAGGCAAGUG |
| siRNA 2817 | 2817 | ACUUGCCUGCUUUACCCAC | 5841 | GUGGGUAAAGCAGGCAAGU |
| siRNA 2818 | 2818 | CUUGCCUGCUUUACCCACA | 5842 | UGUGGGUAAAGCAGGCAAG |
| siRNA 2819 | 2819 | UUGCCUGCUUUACCCACAA | 5843 | UUGUGGGUAAAGCAGGCAA |
| siRNA 2820 | 2820 | UGCCUGCUUUACCCACAAC | 5844 | GUUGUGGGUAAAGCAGGCA |
| siRNA 2821 | 2821 | GCCUGCUUUACCCACAACU | 5845 | AGUUGUGGGUAAAGCAGGC |
| siRNA 2822 | 2822 | CCUGCUUUACCCACAACUG | 5846 | CAGUUGUGGGUAAAGCAGG |
| siRNA 2823 | 2823 | CUGCUUUACCCACAACUGC | 5847 | GCAGUUGUGGGUAAAGCAG |
| siRNA 2824 | 2824 | UGCUUUACCCACAACUGCU | 5848 | AGCAGUUGUGGGUAAAGCA |
| siRNA 2825 | 2825 | GCUUUACCCACAACUGCUG | 5849 | CAGCAGUUGUGGGUAAAGC |
| siRNA 2826 | 2826 | CUUUACCCACAACUGCUGG | 5850 | CCAGCAGUUGUGGGUAAAG |
| siRNA 2827 | 2827 | UUUACCCACAACUGCUGGG | 5851 | CCCAGCAGUUGUGGGUAAA |
| siRNA 2828 | 2828 | UUACCCACAACUGCUGGGU | 5852 | ACCCAGCAGUUGUGGGUAA |
| siRNA 2829 | 2829 | UACCCACAACUGCUGGGUC | 5853 | GACCCAGCAGUUGUGGGUA |
| siRNA 2830 | 2830 | ACCCACAACUGCUGGGUCC | 5854 | GGACCCAGCAGUUGUGGGU |
| siRNA 2831 | 2831 | CCCACAACUGCUGGGUCCU | 5855 | AGGACCCAGCAGUUGUGGG |
| siRNA 2832 | 2832 | CCACAACUGCUGGGUCCUG | 5856 | CAGGACCCAGCAGUUGUGG |
| siRNA 2833 | 2833 | CACAACUGCUGGGUCCUGG | 5857 | CCAGGACCCAGCAGUUGUG |
| siRNA 2834 | 2834 | ACAACUGCUGGGUCCUGGA | 5858 | UCCAGGACCCAGCAGUUGU |
| siRNA 2835 | 2835 | CAACUGCUGGGUCCUGGAA | 5859 | UUCCAGGACCCAGCAGUUG |
| siRNA 2836 | 2836 | AACUGCUGGGUCCUGGAAG | 5860 | CUUCCAGGACCCAGCAGUU |
| siRNA 2837 | 2837 | ACUGCUGGGUCCUGGAAGG | 5861 | CCUUCCAGGACCCAGCAGU |
| siRNA 2838 | 2838 | CUGCUGGGUCCUGGAAGGA | 5862 | UCCUUCCAGGACCCAGCAG |
| siRNA 2839 | 2839 | UGCUGGGUCCUGGAAGGAA | 5863 | UUCCUUCCAGGACCCAGCA |
| siRNA 2840 | 2840 | GCUGGGUCCUGGAAGGAAU | 5864 | AUUCCUUCCAGGACCCAGC |
| siRNA 2841 | 2841 | CUGGGUCCUGGAAGGAAUU | 5865 | AAUUCCUUCCAGGACCCAG |
| siRNA 2842 | 2842 | UGGGUCCUGGAAGGAAUUA | 5866 | UAAUUCCUUCCAGGACCCA |
| siRNA 2843 | 2843 | GGGUCCUGGAAGGAAUUAU | 5867 | AUAAUUCCUUCCAGGACCC |
| siRNA 2844 | 2844 | GGUCCUGGAAGGAAUUAUA | 5868 | UAUAAUUCCUUCCAGGACC |
| siRNA 2845 | 2845 | GUCCUGGAAGGAAUUAUAA | 5869 | UUAUAAUUCCUUCCAGGAC |
| siRNA 2846 | 2846 | UCCUGGAAGGAAUUAUAAU | 5870 | AUUAUAAUUCCUUCCAGGA |
| siRNA 2847 | 2847 | CCUGGAAGGAAUUAUAAUC | 5871 | GAUUAUAAUUCCUUCCAGG |
| siRNA 2848 | 2848 | CUGGAAGGAAUUAUAAUCC | 5872 | GGAUUAUAAUUCCUUCCAG |
| siRNA 2849 | 2849 | UGGAAGGAAUUAUAAUCCC | 5873 | GGGAUUAUAAUUCCUUCCA |
| siRNA 2850 | 2850 | GGAAGGAAUUAUAAUCCCC | 5874 | GGGGAUUAUAAUUCCUUCC |
| siRNA 2851 | 2851 | GAAGGAAUUAUAAUCCCCA | 5875 | UGGGGAUUAUAAUUCCUUC |
| siRNA 2852 | 2852 | AAGGAAUUAUAAUCCCCAA | 5876 | UUGGGGAUUAUAAUUCCUU |
| siRNA 2853 | 2853 | AGGAAUUAUAAUCCCCAAC | 5877 | GUUGGGGAUUAUAAUUCCU |
| siRNA 2854 | 2854 | GGAAUUAUAAUCCCCAACC | 5878 | GGUUGGGGAUUAUAAUUCC |
| siRNA 2855 | 2855 | GAAUUAUAAUCCCCAACCG | 5879 | CGGUUGGGGAUUAUAAUUC |
| siRNA 2856 | 2856 | AAUUAUAAUCCCCAACCGA | 5880 | UCGGUUGGGGAUUAUAAUU |
| siRNA 2857 | 2857 | AUUAUAAUCCCCAACCGAG | 5881 | CUCGGUUGGGGAUUAUAAU |
| siRNA 2858 | 2858 | UUAUAAUCCCCAACCGAGU | 5882 | ACUCGGUUGGGGAUUAUAA |
| siRNA 2859 | 2859 | UAUAAUCCCCAACCGAGUA | 5883 | UACUCGGUUGGGGAUUAUA |
| siRNA 2860 | 2860 | AUAAUCCCCAACCGAGUAU | 5884 | AUACUCGGUUGGGGAUUAU |
| siRNA 2861 | 2861 | UAAUCCCCAACCGAGUAUG | 5885 | CAUACUCGGUUGGGGAUUA |
| siRNA 2862 | 2862 | AAUCCCCAACCGAGUAUGC | 5886 | GCAUACUCGGUUGGGGAUU |
| siRNA 2863 | 2863 | AUCCCCAACCGAGUAUGCG | 5887 | CGCAUACUCGGUUGGGGAU |
| siRNA 2864 | 2864 | UCCCCAACCGAGUAUGCGC | 5888 | GCGCAUACUCGGUUGGGGA |
| siRNA 2865 | 2865 | CCCCAACCGAGUAUGCGCA | 5889 | UGCGCAUACUCGGUUGGGG |
| siRNA 2866 | 2866 | CCCAACCGAGUAUGCGCAA | 5890 | UUGCGCAUACUCGGUUGGG |
| siRNA 2867 | 2867 | CCAACCGAGUAUGCGCAAG | 5891 | CUUGCGCAUACUCGGUUGG |
| siRNA 2868 | 2868 | CAACCGAGUAUGCGCAAGG | 5892 | CCUUGCGCAUACUCGGUUG |
| siRNA 2869 | 2869 | AACCGAGUAUGCGCAAGGU | 5893 | ACCUUGCGCAUACUCGGUU |
| siRNA 2870 | 2870 | ACCGAGUAUGCGCAAGGUC | 5894 | GACCUUGCGCAUACUCGGU |
| siRNA 2871 | 2871 | CCGAGUAUGCGCAAGGUCC | 5895 | GGACCUUGCGCAUACUCGG |
| siRNA 2872 | 2872 | CGAGUAUGCGCAAGGUCCC | 5896 | GGGACCUUGCGCAUACUCG |
| siRNA 2873 | 2873 | GAGUAUGCGCAAGGUCCCG | 5897 | CGGGACCUUGCGCAUACUC |
| siRNA 2874 | 2874 | AGUAUGCGCAAGGUCCCGC | 5898 | GCGGGACCUUGCGCAUACU |
| siRNA 2875 | 2875 | GUAUGCGCAAGGUCCCGCU | 5899 | AGCGGGACCUUGCGCAUAC |
| siRNA 2876 | 2876 | UAUGCGCAAGGUCCCGCUG | 5900 | CAGCGGGACCUUGCGCAUA |
| siRNA 2877 | 2877 | AUGCGCAAGGUCCCGCUGG | 5901 | CCAGCGGGACCUUGCGCAU |
| siRNA 2878 | 2878 | UGCGCAAGGUCCCGCUGGC | 5902 | GCCAGCGGGACCUUGCGCA |
| siRNA 2879 | 2879 | GCGCAAGGUCCCGCUGGCC | 5903 | GGCCAGCGGGACCUUGCGC |
| siRNA 2880 | 2880 | CGCAAGGUCCCGCUGGCCA | 5904 | UGGCCAGCGGGACCUUGCG |
| siRNA 2881 | 2881 | GCAAGGUCCCGCUGGCCAG | 5905 | CUGGCCAGCGGGACCUUGC |
| siRNA 2882 | 2882 | CAAGGUCCCGCUGGCCAGC | 5906 | GCUGGCCAGCGGGACCUUG |
| siRNA 2883 | 2883 | AAGGUCCCGCUGGCCAGCU | 5907 | AGCUGGCCAGCGGGACCUU |
| siRNA 2884 | 2884 | AGGUCCCGCUGGCCAGCUG | 5908 | CAGCUGGCCAGCGGGACCU |
| siRNA 2885 | 2885 | GGUCCCGCUGGCCAGCUGU | 5909 | ACAGCUGGCCAGCGGGACC |
| siRNA 2886 | 2886 | GUCCCGCUGGCCAGCUGUC | 5910 | GACAGCUGGCCAGCGGGAC |
| siRNA 2887 | 2887 | UCCCGCUGGCCAGCUGUCU | 5911 | AGACAGCUGGCCAGCGGGA |
| siRNA 2888 | 2888 | CCCGCUGGCCAGCUGUCUU | 5912 | AAGACAGCUGGCCAGCGGG |
| siRNA 2889 | 2889 | CCGCUGGCCAGCUGUCUUC | 5913 | GAAGACAGCUGGCCAGCGG |
| siRNA 2890 | 2890 | CGCUGGCCAGCUGUCUUCA | 5914 | UGAAGACAGCUGGCCAGCG |
| siRNA 2891 | 2891 | GCUGGCCAGCUGUCUUCAC | 5915 | GUGAAGACAGCUGGCCAGC |
| siRNA 2892 | 2892 | CUGGCCAGCUGUCUUCACG | 5916 | CGUGAAGACAGCUGGCCAG |
| siRNA 2893 | 2893 | UGGCCAGCUGUCUUCACGC | 5917 | GCGUGAAGACAGCUGGCCA |
| siRNA 2894 | 2894 | GGCCAGCUGUCUUCACGCG | 5918 | CGCGUGAAGACAGCUGGCC |
| siRNA 2895 | 2895 | GCCAGCUGUCUUCACGCGU | 5919 | ACGCGUGAAGACAGCUGGC |
| siRNA 2896 | 2896 | CCAGCUGUCUUCACGCGUG | 5920 | CACGCGUGAAGACAGCUGG |
| siRNA 2897 | 2897 | CAGCUGUCUUCACGCGUGU | 5921 | ACACGCGUGAAGACAGCUG |
| siRNA 2898 | 2898 | AGCUGUCUUCACGCGUGUC | 5922 | GACACGCGUGAAGACAGCU |
| siRNA 2899 | 2899 | GCUGUCUUCACGCGUGUCU | 5923 | AGACACGCGUGAAGACAGC |
| siRNA 2900 | 2900 | CUGUCUUCACGCGUGUCUC | 5924 | GAGACACGCGUGAAGACAG |
| siRNA 2901 | 2901 | UGUCUUCACGCGUGUCUCU | 5925 | AGAGACACGCGUGAAGACA |
| siRNA 2902 | 2902 | GUCUUCACGCGUGUCUCUG | 5926 | CAGAGACACGCGUGAAGAC |
| siRNA 2903 | 2903 | UCUUCACGCGUGUCUCUGU | 5927 | ACAGAGACACGCGUGAAGA |
| siRNA 2904 | 2904 | CUUCACGCGUGUCUCUGUG | 5928 | CACAGAGACACGCGUGAAG |
| siRNA 2905 | 2905 | UUCACGCGUGUCUCUGUGU | 5929 | ACACAGAGACACGCGUGAA |
| siRNA 2906 | 2906 | UCACGCGUGUCUCUGUGUU | 5930 | AACACAGAGACACGCGUGA |
| siRNA 2907 | 2907 | CACGCGUGUCUCUGUGUUU | 5931 | AAACACAGAGACACGCGUG |
| siRNA 2908 | 2908 | ACGCGUGUCUCUGUGUUUG | 5932 | CAAACACAGAGACACGCGU |
| siRNA 2909 | 2909 | CGCGUGUCUCUGUGUUUGU | 5933 | ACAAACACAGAGACACGCG |
| siRNA 2910 | 2910 | GCGUGUCUCUGUGUUUGUG | 5934 | CACAAACACAGAGACACGC |
| siRNA 2911 | 2911 | CGUGUCUCUGUGUUUGUGG | 5935 | CCACAAACACAGAGACACG |
| siRNA 2912 | 2912 | GUGUCUCUGUGUUUGUGGA | 5936 | UCCACAAACACAGAGACAC |
| siRNA 2913 | 2913 | UGUCUCUGUGUUUGUGGAC | 5937 | GUCCACAAACACAGAGACA |
| siRNA 2914 | 2914 | GUCUCUGUGUUUGUGGACU | 5938 | AGUCCACAAACACAGAGAC |
| siRNA 2915 | 2915 | UCUCUGUGUUUGUGGACUG | 5939 | CAGUCCACAAACACAGAGA |
| siRNA 2916 | 2916 | CUCUGUGUUUGUGGACUGG | 5940 | CCAGUCCACAAACACAGAG |
| siRNA 2917 | 2917 | UCUGUGUUUGUGGACUGGA | 5941 | UCCAGUCCACAAACACAGA |
| siRNA 2918 | 2918 | CUGUGUUUGUGGACUGGAU | 5942 | AUCCAGUCCACAAACACAG |
| siRNA 2919 | 2919 | UGUGUUUGUGGACUGGAUU | 5943 | AAUCCAGUCCACAAACACA |
| siRNA 2920 | 2920 | GUGUUUGUGGACUGGAUUC | 5944 | GAAUCCAGUCCACAAACAC |
| siRNA 2921 | 2921 | UGUUUGUGGACUGGAUUCA | 5945 | UGAAUCCAGUCCACAAACA |
| siRNA 2922 | 2922 | GUUUGUGGACUGGAUUCAC | 5946 | GUGAAUCCAGUCCACAAAC |
| siRNA 2923 | 2923 | UUUGUGGACUGGAUUCACA | 5947 | UGUGAAUCCAGUCCACAAA |
| siRNA 2924 | 2924 | UUGUGGACUGGAUUCACAA | 5948 | UUGUGAAUCCAGUCCACAA |
| siRNA 2925 | 2925 | UGUGGACUGGAUUCACAAG | 5949 | CUUGUGAAUCCAGUCCACA |
| siRNA 2926 | 2926 | GUGGACUGGAUUCACAAGG | 5950 | CCUUGUGAAUCCAGUCCAC |
| siRNA 2927 | 2927 | UGGACUGGAUUCACAAGGU | 5951 | ACCUUGUGAAUCCAGUCCA |
| siRNA 2928 | 2928 | GGACUGGAUUCACAAGGUC | 5952 | GACCUUGUGAAUCCAGUCC |
| siRNA 2929 | 2929 | GACUGGAUUCACAAGGUCA | 5953 | UGACCUUGUGAAUCCAGUC |
| siRNA 2930 | 2930 | ACUGGAUUCACAAGGUCAU | 5954 | AUGACCUUGUGAAUCCAGU |
| siRNA 2931 | 2931 | CUGGAUUCACAAGGUCAUG | 5955 | CAUGACCUUGUGAAUCCAG |
| siRNA 2932 | 2932 | UGGAUUCACAAGGUCAUGA | 5956 | UCAUGACCUUGUGAAUCCA |
| siRNA 2933 | 2933 | GGAUUCACAAGGUCAUGAG | 5957 | CUCAUGACCUUGUGAAUCC |
| siRNA 2934 | 2934 | GAUUCACAAGGUCAUGAGA | 5958 | UCUCAUGACCUUGUGAAUC |
| siRNA 2935 | 2935 | AUUCACAAGGUCAUGAGAC | 5959 | GUCUCAUGACCUUGUGAAU |
| siRNA 2936 | 2936 | UUCACAAGGUCAUGAGACU | 5960 | AGUCUCAUGACCUUGUGAA |
| siRNA 2937 | 2937 | UCACAAGGUCAUGAGACUG | 5961 | CAGUCUCAUGACCUUGUGA |
| siRNA 2938 | 2938 | CACAAGGUCAUGAGACUGG | 5962 | CCAGUCUCAUGACCUUGUG |
| siRNA 2939 | 2939 | ACAAGGUCAUGAGACUGGG | 5963 | CCCAGUCUCAUGACCUUGU |
| siRNA 2940 | 2940 | CAAGGUCAUGAGACUGGGU | 5964 | ACCCAGUCUCAUGACCUUG |
| siRNA 2941 | 2941 | AAGGUCAUGAGACUGGGUU | 5965 | AACCCAGUCUCAUGACCUU |
| siRNA 2942 | 2942 | AGGUCAUGAGACUGGGUUA | 5966 | UAACCCAGUCUCAUGACCU |
| siRNA 2943 | 2943 | GGUCAUGAGACUGGGUUAG | 5967 | CUAACCCAGUCUCAUGACC |
| siRNA 2944 | 2944 | GUCAUGAGACUGGGUUAGG | 5968 | CCUAACCCAGUCUCAUGAC |
| siRNA 2945 | 2945 | UCAUGAGACUGGGUUAGGC | 5969 | GCCUAACCCAGUCUCAUGA |
| siRNA 2946 | 2946 | CAUGAGACUGGGUUAGGCC | 5970 | GGCCUAACCCAGUCUCAUG |
| siRNA 2947 | 2947 | AUGAGACUGGGUUAGGCCC | 5971 | GGGCCUAACCCAGUCUCAU |
| siRNA 2948 | 2948 | UGAGACUGGGUUAGGCCCA | 5972 | UGGGCCUAACCCAGUCUCA |
| siRNA 2949 | 2949 | GAGACUGGGUUAGGCCCAG | 5973 | CUGGGCCUAACCCAGUCUC |
| siRNA 2950 | 2950 | AGACUGGGUUAGGCCCAGC | 5974 | GCUGGGCCUAACCCAGUCU |
| siRNA 2951 | 2951 | GACUGGGUUAGGCCCAGCC | 5975 | GGCUGGGCCUAACCCAGUC |
| siRNA 2952 | 2952 | ACUGGGUUAGGCCCAGCCU | 5976 | AGGCUGGGCCUAACCCAGU |
| siRNA 2953 | 2953 | CUGGGUUAGGCCCAGCCUU | 5977 | AAGGCUGGGCCUAACCCAG |
| siRNA 2954 | 2954 | UGGGUUAGGCCCAGCCUUG | 5978 | CAAGGCUGGGCCUAACCCA |
| siRNA 2955 | 2955 | GGGUUAGGCCCAGCCUUGA | 5979 | UCAAGGCUGGGCCUAACCC |
| siRNA 2956 | 2956 | GGUUAGGCCCAGCCUUGAU | 5980 | AUCAAGGCUGGGCCUAACC |
| siRNA 2957 | 2957 | GUUAGGCCCAGCCUUGAUG | 5981 | CAUCAAGGCUGGGCCUAAC |
| siRNA 2958 | 2958 | UUAGGCCCAGCCUUGAUGC | 5982 | GCAUCAAGGCUGGGCCUAA |
| siRNA 2959 | 2959 | UAGGCCCAGCCUUGAUGCC | 5983 | GGCAUCAAGGCUGGGCCUA |
| siRNA 2960 | 2960 | AGGCCCAGCCUUGAUGCCA | 5984 | UGGCAUCAAGGCUGGGCCU |
| siRNA 2961 | 2961 | GGCCCAGCCUUGAUGCCAU | 5985 | AUGGCAUCAAGGCUGGGCC |
| siRNA 2962 | 2962 | GCCCAGCCUUGAUGCCAUA | 5986 | UAUGGCAUCAAGGCUGGGC |
| siRNA 2963 | 2963 | CCCAGCCUUGAUGCCAUAU | 5987 | AUAUGGCAUCAAGGCUGGG |
| siRNA 2964 | 2964 | CCAGCCUUGAUGCCAUAUG | 5988 | CAUAUGGCAUCAAGGCUGG |
| siRNA 2965 | 2965 | CAGCCUUGAUGCCAUAUGC | 5989 | GCAUAUGGCAUCAAGGCUG |
| siRNA 2966 | 2966 | AGCCUUGAUGCCAUAUGCC | 5990 | GGCAUAUGGCAUCAAGGCU |
| siRNA 2967 | 2967 | GCCUUGAUGCCAUAUGCCU | 5991 | AGGCAUAUGGCAUCAAGGC |
| siRNA 2968 | 2968 | CCUUGAUGCCAUAUGCCUU | 5992 | AAGGCAUAUGGCAUCAAGG |
| siRNA 2969 | 2969 | CUUGAUGCCAUAUGCCUUG | 5993 | CAAGGCAUAUGGCAUCAAG |
| siRNA 2970 | 2970 | UUGAUGCCAUAUGCCUUGG | 5994 | CCAAGGCAUAUGGCAUCAA |
| siRNA 2971 | 2971 | UGAUGCCAUAUGCCUUGGG | 5995 | CCCAAGGCAUAUGGCAUCA |
| siRNA 2972 | 2972 | GAUGCCAUAUGCCUUGGGG | 5996 | CCCCAAGGCAUAUGGCAUC |
| siRNA 2973 | 2973 | AUGCCAUAUGCCUUGGGGA | 5997 | UCCCCAAGGCAUAUGGCAU |
| siRNA 2974 | 2974 | UGCCAUAUGCCUUGGGGAG | 5998 | CUCCCCAAGGCAUAUGGCA |
| siRNA 2975 | 2975 | GCCAUAUGCCUUGGGGAGG | 5999 | CCUCCCCAAGGCAUAUGGC |
| siRNA 2976 | 2976 | CCAUAUGCCUUGGGGAGGA | 6000 | UCCUCCCCAAGGCAUAUGG |
| siRNA 2977 | 2977 | CAUAUGCCUUGGGGAGGAC | 6001 | GUCCUCCCCAAGGCAUAUG |
| siRNA 2978 | 2978 | AUAUGCCUUGGGGAGGACA | 6002 | UGUCCUCCCCAAGGCAUAU |
| siRNA 2979 | 2979 | UAUGCCUUGGGGAGGACAA | 6003 | UUGUCCUCCCCAAGGCAUA |
| siRNA 2980 | 2980 | AUGCCUUGGGGAGGACAAA | 6004 | UUUGUCCUCCCCAAGGCAU |
| siRNA 2981 | 2981 | UGCCUUGGGGAGGACAAAA | 6005 | UUUUGUCCUCCCCAAGGCA |
| siRNA 2982 | 2982 | GCCUUGGGGAGGACAAAAC | 6006 | GUUUUGUCCUCCCCAAGGC |
| siRNA 2983 | 2983 | CCUUGGGGAGGACAAAACU | 6007 | AGUUUUGUCCUCCCCAAGG |
| siRNA 2984 | 2984 | CUUGGGGAGGACAAAACUU | 6008 | AAGUUUUGUCCUCCCCAAG |
| siRNA 2985 | 2985 | UUGGGGAGGACAAAACUUC | 6009 | GAAGUUUUGUCCUCCCCAA |
| siRNA 2986 | 2986 | UGGGGAGGACAAAACUUCU | 6010 | AGAAGUUUUGUCCUCCCCA |
| siRNA 2987 | 2987 | GGGGAGGACAAAACUUCUU | 6011 | AAGAAGUUUUGUCCUCCCC |
| siRNA 2988 | 2988 | GGGAGGACAAAACUUCUUG | 6012 | CAAGAAGUUUUGUCCUCCC |
| siRNA 2989 | 2989 | GGAGGACAAAACUUCUUGU | 6013 | ACAAGAAGUUUUGUCCUCC |
| siRNA 2990 | 2990 | GAGGACAAAACUUCUUGUC | 6014 | GACAAGAAGUUUUGUCCUC |
| siRNA 2991 | 2991 | AGGACAAAACUUCUUGUCA | 6015 | UGACAAGAAGUUUUGUCCU |
| siRNA 2992 | 2992 | GGACAAAACUUCUUGUCAG | 6016 | CUGACAAGAAGUUUUGUCC |
| siRNA 2993 | 2993 | GACAAAACUUCUUGUCAGA | 6017 | UCUGACAAGAAGUUUUGUC |
| siRNA 2994 | 2994 | ACAAAACUUCUUGUCAGAC | 6018 | GUCUGACAAGAAGUUUUGU |
| siRNA 2995 | 2995 | CAAAACUUCUUGUCAGACA | 6019 | UGUCUGACAAGAAGUUUUG |
| siRNA 2996 | 2996 | AAAACUUCUUGUCAGACAU | 6020 | AUGUCUGACAAGAAGUUUU |
| siRNA 2997 | 2997 | AAACUUCUUGUCAGACAUA | 6021 | UAUGUCUGACAAGAAGUUU |
| siRNA 2998 | 2998 | AACUUCUUGUCAGACAUAA | 6022 | UUAUGUCUGACAAGAAGUU |
| siRNA 2999 | 2999 | ACUUCUUGUCAGACAUAAA | 6023 | UUUAUGUCUGACAAGAAGU |
| siRNA 3000 | 3000 | CUUCUUGUCAGACAUAAAG | 6024 | CUUUAUGUCUGACAAGAAG |
| siRNA 3001 | 3001 | UUCUUGUCAGACAUAAAGC | 6025 | GCUUUAUGUCUGACAAGAA |
| siRNA 3002 | 3002 | UCUUGUCAGACAUAAAGCC | 6026 | GGCUUUAUGUCUGACAAGA |
| siRNA 3003 | 3003 | CUUGUCAGACAUAAAGCCA | 6027 | UGGCUUUAUGUCUGACAAG |
| siRNA 3004 | 3004 | UUGUCAGACAUAAAGCCAU | 6028 | AUGGCUUUAUGUCUGACAA |
| siRNA 3005 | 3005 | UGUCAGACAUAAAGCCAUG | 6029 | CAUGGCUUUAUGUCUGACA |
| siRNA 3006 | 3006 | GUCAGACAUAAAGCCAUGU | 6030 | ACAUGGCUUUAUGUCUGAC |
| siRNA 3007 | 3007 | UCAGACAUAAAGCCAUGUU | 6031 | AACAUGGCUUUAUGUCUGA |
| siRNA 3008 | 3008 | CAGACAUAAAGCCAUGUUU | 6032 | AAACAUGGCUUUAUGUCUG |
| siRNA 3009 | 3009 | AGACAUAAAGCCAUGUUUC | 6033 | GAAACAUGGCUUUAUGUCU |
| siRNA 3010 | 3010 | GACAUAAAGCCAUGUUUCC | 6034 | GGAAACAUGGCUUUAUGUC |
| siRNA 3011 | 3011 | ACAUAAAGCCAUGUUUCCU | 6035 | AGGAAACAUGGCUUUAUGU |
| siRNA 3012 | 3012 | CAUAAAGCCAUGUUUCCUC | 6036 | GAGGAAACAUGGCUUUAUG |
| siRNA 3013 | 3013 | AUAAAGCCAUGUUUCCUCU | 6037 | AGAGGAAACAUGGCUUUAU |
| siRNA 3014 | 3014 | UAAAGCCAUGUUUCCUCUU | 6038 | AAGAGGAAACAUGGCUUUA |
| siRNA 3015 | 3015 | AAAGCCAUGUUUCCUCUUU | 6039 | AAAGAGGAAACAUGGCUUU |
| siRNA 3016 | 3016 | AAGCCAUGUUUCCUCUUUA | 6040 | UAAAGAGGAAACAUGGCUU |
| siRNA 3017 | 3017 | AGCCAUGUUUCCUCUUUAU | 6041 | AUAAAGAGGAAACAUGGCU |
| siRNA 3018 | 3018 | GCCAUGUUUCCUCUUUAUG | 6042 | CAUAAAGAGGAAACAUGGC |
| siRNA 3019 | 3019 | CCAUGUUUCCUCUUUAUGC | 6043 | GCAUAAAGAGGAAACAUGG |
| siRNA 3020 | 3020 | CAUGUUUCCUCUUUAUGCC | 6044 | GGCAUAAAGAGGAAACAUG |
| siRNA 3021 | 3021 | AUGUUUCCUCUUUAUGCCU | 6045 | AGGCAUAAAGAGGAAACAU |
| siRNA 3022 | 3022 | UGUUUCCUCUUUAUGCCUG | 6046 | CAGGCAUAAAGAGGAAACA |
| siRNA 3023 | 3023 | GUUUCCUCUUUAUGCCUGU | 6047 | ACAGGCAUAAAGAGGAAAC |
| siRNA 3024 | 3024 | UUUCCUCUUUAUGCCUGUA | 6048 | UACAGGCAUAAAGAGGAAA |

TABLE 33C
Additional Sequences

| SEQ ID | |
|---|---|
| NO: | 5′ to 3′ Sequence |
| 6163 | GAAGCTGGGGCAAGTAATTTTCCCCAATTTACAGGGAAAAACCGAAATTCAGAAAAGTTTAATGTCACCCAGGGGCT |
| | GGAGCCCAGACCTCTGGCAGCTCTCACTTTCACAATGCCCTTGGGCTGACTAGGCTGCAGAGGGGTTTCACCCCAACC |
| | CCAGGGCACCTCAAGTGTCCCCACCAAACCTTCCTAACACCTGTCCACTAAGCTGTACTAGGCCCTTGCAACTGACCT |
| | ATGGGACCTGAGGCCTGGCCCCTCATGGCTCCTGTCACCAGGTCTCAGGTCAGGGTCCAGCAGGCCCTGAGCTGACG |
| | TGTGGAGCCAGAGCCACCCAATCCCGTAGGGACAGGTTTCACAACTTCCCGGATGGGGCTGTGGTGGGTCACAGTGC |
| | AGCCTCCAGCCAGAAGGATGGGGTGGCTCCCACTCCTGCTGCTTCTGACTCAATGCTTAGGGGTCCCTGGGCAGCGCT |
| | CGCCATTGAATGACTTCCAAGTGCTCCGGGGCACAGAGCTACAGCACCTGCTACATGCGGTGGTGCCCGGGCCTTGG |
| | CAGGAGGATGTGGCAGATGCTGAAGAGTGTGCTGGTCGCTGTGGGCCCTTAATGGACTGCCGGGCCTTCCACTACAA |
| | CGTGAGCAGCCATGGTTGCCAACTGCTGCCATGGACTCAACACTCGCCCCACACGAGGCTGCGGCGTTCTGGGCGCT |
| | GTGACCTCTTCCAGAAGAAAGACTACGTACGGACCTGCATCATGAACAATGGGGTTGGGTACCGGGGCACCATGGCC |
| | ACGACCGTGGGTGGCCTGCCCTGCCAGGCTTGGAGCCACAAGTTCCCAAATGATCACAAGTACACGCCCACTCTCCG |
| | GAATGGCCTGGAAGAGAACTTCTGCCGTAACCCTGATGGCGACCCCGGAGGTCCTTGGTGCTACACAACAGACCCTG |
| | CTGTGCGCTTCCAGAGCTGCGGCATCAAATCCTGCCGGGAGGCCGCGTGTGTCTGGTGCAATGGCGAGGAATACCGC |
| | GGCGCGGTAGACCGCACGGAGTCAGGGCGCGAGTGCCAGCGCTGGGATCTTCAGCACCCGCACCAGCACCCCTTCGA |
| | GCCGGGCAAGTTCCTCGACCAAGGTCTGGACGACAACTATTGCCGGAATCCTGACGGCTCCGAGCGGCCATGGTGCT |
| | ACACTACGGATCCGCAGATCGAGCGAGAGTTCTGTGACCTCCCCCGCTGCGGGTCCGAGGCACAGCCCCGCCAAGAG |
| | GCCACAACTGTCAGCTGCTTCCGCGGGAAGGGTGAGGGCTACCGGGGCACAGCCAATACCACCACTGCGGGCGTACC |
| | TTGCCAGCGTTGGGACGCGCAAATCCCGCATCAGCACCGATTTACGCCAGAAAAATACGCGTGCAAAGACCTTCGGG |
| | AGAACTTCTGCCGGAACCCCGACGGCTCAGAGGCGCCCTGGTGCTTCACACTGCGGCCCGGCATGCGCGCGGCCTTTT |
| | GCTACCAGATCCGGCGTTGTACAGACGACGTGCGGCCCCAGGACTGCTACCACGGCGCAGGGGAGCAGTACCGCGGC |
| | ACGGTCAGCAAGACCCGCAAGGGTGTCCAGTGCCAGCGCTGGTCCGCTGAGACGCCGCACAAGCCGCAGTTCACGTT |
| | TACCTCCGAACCGCATGCACAACTGGAGGAGAACTTCTGCCGGAACCCAGATGGGGATAGCCATGGGCCCTGGTGCT |
| | ACACGATGGACCCAAGGACCCCATTCGACTACTGTGCCCTGCGACGCTGCGCTGATGACCAGCCGCCATCAATCCTG |
| | GACCCCCCAGACCAGGTGCAGTTTGAGAAGTGTGGCAAGAGGGTGGATCGGCTGGATCAGCGGCGTTCCAAGCTGCG |
| | CGTGGTTGGGGGCCATCCGGGCAACTCACCCTGGACAGTCAGCTTGCGGAATCGGCAGGGCCAGCATTTCTGCGGGG |
| | GGTCTCTAGTGAAGGAGCAGTGGATACTGACTGCCCGGCAGTGCTTCTCCTCCTGCCATATGCCTCTCACGGGCTATG |
| | AGGTATGGTTGGGCACCCTGTTCCAGAACCCACAGCATGGAGAGCCAAGCCTACAGCGGGTCCCAGTAGCCAAGATG |
| | GTGTGTGGGCCCTCAGGCTCCCAGCTTGTCCTGCTCAAGCTGGAGAGATCTGTGACCCTGAACCAGCGTGTGGCCCTG |
| | ATCTGCCTGCCCCCTGAATGGTATGTGGTGCCTCCAGGGACCAAGTGTGAGATTGCAGGCTGGGGTGAGACCAAAGG |
| | TACGGGTAATGACACAGTCCTAAATGTGGCCTTGCTGAATGTCATCTCCAACCAGGAGTGTAACATCAAGCACCGAG |
| | GACGTGTGCGGGAGAGTGAGATGTGCACTGAGGGACTGTTGGCCCCTGTGGGGGCCTGTGAGGGTGACTACGGGGGC |
| | CCACTTGCCTGCTTTACCCACAACTGCTGGGTCCTGGAAGGAATTATAATCCCCAACCGAGTATGCGCAAGGTCCCGC |
| | TGGCCAGCTGTCTTCACGCGTGTCTCTGTGTTTGTGGACTGGATTCACAAGGTCATGAGACTGGGTTAGGCCCAGCCT |
| | TGATGCCATATGCCTTGGGGAGGACAAAACTTCTTGTCAGACATAAAGCCATGTTTCCTCTTTATGCCTGTA |
| 6185 | CAGCCTCCGCTAGGGGACCCCCTCCATGGCTTCCCACCGGGTTGTTCCAGGCCTCAGCTTCGCCGAAAGGCCTCACCA |
| | CCTCCGACCTCCGCCTGCTCTGGGGATGCTCCCAGCCCTGCTGCGGCAGAACGCGACATGCTAACCGGAATCCCTAGG |
| | CCGCCTGTCTCCTACCCATACTTAGAGGCCCCGCTCAGACGGTCCTTAAAACGTCTGAAAGGCCGTTCCTGCCAGAGT |
| | CCCTGCTACCTGTTACCTCCACCCCTATTTAGTCCTAGTGGACAGCCTCGCTCACCTTCCCTGGGATGACACTTCTGGC |
| | GGCTGAGATGAGCGAGCCTCTCTGGGCTCTGCCGCCGGGTGTGGGCTGACCTGCCTACAGCTGGGGCCTGATAAGGC |
| | AGCAGCAAAAGGGTGGAGGGGAGGCAGTGTTGAAGCTGGGGCAAGTAATTTTCCCCAATTTACAGGGAAAAACCGA |
| | AATTCAGAAAAGTTTAATGTCACCCAGGGGCTGGAGCCCAGACCTCTGGCAGCTCTCACTTTCACAATGCCCTTGGGC |
| | TGACTAGGCTGCAGAGGGGTTTCACCCCAACCCCAGGGCACCTCAAGTGTCCCCACCAAACCTTCCTAACACCTGTCC |
| | ACTAAGCTGTACTAGGCCCTTGCAACTGACCTATGGGACCTGAGGCCTGGCCCCTCATGGCTCCTGTCACCAGGTCTC |
| | AGGTCAGGGTCCAGCAGGCCCTGAGCTGACGTGTGGAGCCAGAGCCACCCAATCCCGTAGGGACAGGTTTCACAACT |
| | TCCCGGATGGGGCTGTGGTGGGTCACAGTGCAGCCTCCAGCCAGAAGGATGGGGTGGCTCCCACTCCTGCTGCTTCTG |
| | ACTCAATGCTTAGGGGTCCCTGGGCAGCGCTCGCCATTGAATGACTTCCAAGTGCTCCGGGGCACAGAGCTACAGCA |
| | CCTGCTACATGCGGTGGTGCCCGGGCCTTGGCAGGAGGATGTGGCAGATGCTGAAGAGTGTGCTGGTCGCTGTGGGC |
| | CCTTAATGGACTGCCGGGCCTTCCACTACAACGTGAGCAGCCATGGTTGCCAACTGCTGCCATGGACTCAACACTCGC |
| | CCCACACGAGGCTGCGGCGTTCTGGGCGCTGTGACCTCTTCCAGAAGAAAGACTACGTACGGACCTGCATCATGAAC |
| | AATGGGGTTGGGTACCGGGGCACCATGGCCACGACCGTGGGTGGCCTGCCCTGCCAGGCTTGGAGCCACAAGTTCCC |
| | AAATGATCACAAGTACACGCCCACTCTCCGGAATGGCCTGGAAGAGAACTTCTGCCGTAACCCTGATGGCGACCCCG |
| | GAGGTCCTTGGTGCTACACAACAGACCCTGCTGTGCGCTTCCAGAGCTGCGGCATCAAATCCTGCCGGGAGGCCGCG |
| | TGTGTCTGGTGCAATGGCGAGGAATACCGCGGCGCGGTAGACCGCACGGAGTCAGGGCGCGAGTGCCAGCGCTGGG |
| | ATCTTCAGCACCCGCACCAGCACCCCTTCGAGCCGGGCAAGTTCCTCGACCAAGGTCTGGACGACAACTATTGCCGG |
| | AATCCTGACGGCTCCGAGCGGCCATGGTGCTACACTACGGATCCGCAGATCGAGCGAGAGTTCTGTGACCTCCCCCG |
| | CTGCGGGTCCGAGGCACAGCCCCGCCAAGAGGCCACAACTGTCAGCTGCTTCCGCGGGAAGGGTGAGGGCTACCGG |
| | GGCACAGCCAATACCACCACTGCGGGCGTACCTTGCCAGCGTTGGGACGCGCAAATCCCGCATCAGCACCGATTTAC |
| | GCCAGAAAAATACGCGTGCAAAGACCTTCGGGAGAACTTCTGCCGGAACCCCGACGGCTCAGAGGCGCCCTGGTGCT |
| | TCACACTGCGGCCCGGCATGCGCGCGGCCTTTTGCTACCAGATCCGGCGTTGTACAGACGACGTGCGGCCCCAGGAC |
| | TGCTACCACGGCGCAGGGGAGCAGTACCGCGGCACGGTCAGCAAGACCCGCAAGGGTGTCCAGTGCCAGCGCTGGT |
| | CCGCTGAGACGCCGCACAAGCCGCAGTTCACGTTTACCTCCGAACCGCATGCACAACTGGAGGAGAACTTCTGCCGG |
| | AACCCAGATGGGGATAGCCATGGGCCCTGGTGCTACACGATGGACCCAAGGACCCCATTCGACTACTGTGCCCTGCG |
| | ACGCTGCGCTGATGACCAGCCGCCATCAATCCTGGACCCCCCAGACCAGGTGCAGTTTGAGAAGTGTGGCAAGAGGG |
| | TGGATCGGCTGGATCAGCGGCGTTCCAAGCTGCGCGTGGTTGGGGGCCATCCGGGCAACTCACCCTGGACAGTCAGC |
| | TTGCGGAATCGGCAGGGCCAGCATTTCTGCGGGGGGTCTCTAGTGAAGGAGCAGTGGATACTGACTGCCCGGCAGTG |
| | CTTCTCCTCCTGCCATATGCCTCTCACGGGCTATGAGGTATGGTTGGGCACCCTGTTCCAGAACCCACAGCATGGAGA |
| | GCCAAGCCTACAGCGGGTCCCAGTAGCCAAGATGGTGTGTGGGCCCTCAGGCTCCCAGCTTGTCCTGCTCAAGCTGG |
| | AGAGATCTGTGACCCTGAACCAGCGTGTGGCCCTGATCTGCCTGCCCCCTGAATGGTATGTGGTGCCTCCAGGGACCA |
| | AGTGTGAGATTGCAGGCTGGGGTGAGACCAAAGGTACGGGTAATGACACAGTCCTAAATGTGGCCTTGCTGAATGTC |
| | ATCTCCAACCAGGAGTGTAACATCAAGCACCGAGGACGTGTGCGGGAGAGTGAGATGTGCACTGAGGGACTGTTGGC |
| | CCCTGTGGGGGCCTGTGAGGGTGACTACGGGGGCCCACTTGCCTGCTTTACCCACAACTGCTGGGTCCTGGAAGGAA |
| | TTATAATCCCCAACCGAGTATGCGCAAGGTCCCGCTGGCCAGCTGTCTTCACGCGTGTCTCTGTGTTTGTGGACTGGA |
| | TTCACAAGGTCATGAGACTGGGTTAGGCCCAGCCTTGATGCCATATGCCTTGGGGAGGACAAAACTTCTTGTCAGAC |
| | ATAAAGCCATGTTTCCTCTTTATGCCTGTA |
| 6358 | AAAAGUUUAAUGUCACCCAUU |
| 6359 | AACUUCUUGUCAGACAUAAUU |
| 6360 | UAAUGACACAGUCCUAAAAUU |
| 6361 | GUAAUGACACAGUCCUAAAUU |
| 6362 | CAACCAGGAGUGUAACAUAUU |
| 6363 | CCUGAAUGGUAUGUGGUGAUU |
| 6364 | CACAGUCCUAAAUGUGGCAUU |
| 6365 | CAAGCCGCAGUUCACGUUAUU |
| 6366 | UCUUCACGCGUGUCUCUGAUU |
| 6367 | ACUAUUGCCGGAAUCCUGAUU |
| 6368 | AUUCGACUACUGUGCCCUAUU |
| 6369 | AGUUUGAGAAGUGUGGCAAUU |
| 6370 | AUGACACAGUCCUAAAUGAUU |
| 6371 | ACAAAACUUCUUGUCAGAAUU |
| 6372 | CUUCUUGUCAGACAUAAAUUU |
| 6373 | CUUCUUGUCAGACAUAAAAUU |
| 6374 | CUUCUUGUCAGACAUAAAGUU |
| 6375 | GGUCCUGGAAGGAAUUAUAUU |
| 6376 | GGUCCUGGAAGGAAUUAUUUU |
| 6377 | GACAACUAUUGCCGGAAUAUU |
| 6378 | UGACACAGUCCUAAAUGUAUU |
| 6379 | AGUCCUAAAUGUGGCCUUAUU |
| 6380 | GAGUGUAACAUCAAGCACAUU |
| 6381 | GUGUAACAUCAAGCACCGAUU |
| 6382 | AUUAUAAUCCCCAACCGAAUU |
| 6383 | UAUAAUCCCCAACCGAGUAUU |
| 6384 | ACUUCUUGUCAGACAUAAUUU |
| 6385 | ACUUCUUGUCAGACAUAAAUU |
| 6386 | UCUUGUCAGACAUAAAGCAUU |
| 6387 | UUGUCAGACAUAAAGCCAAUU |
| 6388 | UGGGUGACAUUAAACUUUUUU |
| 6389 | UUAUGUCUGACAAGAAGUUUU |
| 6390 | UUUUAGGACUGUGUCAUUAUU |
| 6391 | UUUAGGACUGUGUCAUUACUU |
| 6392 | UAUGUUACACUCCUGGUUGUU |
| 6393 | UCACCACAUACCAUUCAGGUU |
| 6394 | UGCCACAUUUAGGACUGUGUU |
| 6395 | UAACGUGAACUGCGGCUUGUU |
| 6396 | UCAGAGACACGCGUGAAGAUU |
| 6397 | UCAGGAUUCCGGCAAUAGUUU |
| 6398 | UAGGGCACAGUAGUCGAAUUU |
| 6399 | UUGCCACACUUCUCAAACUUU |
| 6400 | UCAUUUAGGACUGUGUCAUUU |
| 6401 | UUCUGACAAGAAGUUUUGUUU |
| 6402 | AUUUAUGUCUGACAAGAAGUU |
| 6403 | UUUUAUGUCUGACAAGAAGUU |
| 6404 | CUUUAUGUCUGACAAGAAGUU |
| 6405 | UAUAAUUCCUUCCAGGACCUU |
| 6406 | AAUAAUUCCUUCCAGGACCUU |
| 6407 | UAUUCCGGCAAUAGUUGUCUU |
| 6408 | UACAUUUAGGACUGUGUCAUU |
| 6409 | UAAGGCCACAUUUAGGACUUU |
| 6410 | UGUGCUUGAUGUUACACUCUU |
| 6411 | UCGGUGCUUGAUGUUACACUU |
| 6412 | UUCGGUUGGGGAUUAUAAUUU |
| 6413 | UACUCGGUUGGGGAUUAUAUU |
| 6414 | AUUAUGUCUGACAAGAAGUUU |
| 6415 | UUUAUGUCUGACAAGAAGUUU |
| 6416 | UGCUUUAUGUCUGACAAGAUU |
| 6417 | UUGGCUUUAUGUCUGACAAUU |

The application's sequence listing, which the Patent Office published only in electronic form, follows.

SEQUENCE LISTING (6535 sequences)

SEQ ID NO: 1 - RNA, 19 nt, synthetic construct
  misc_feature 1..19: note = Description of Artificial Sequence: Synthetic oligonucleotide
  source 1..19: mol_type = other RNA
cagcctccgctaggggacc

SEQ ID NO: 2 - RNA, 19 nt, synthetic construct
  misc_feature 1..19: note = Description of Artificial Sequence: Synthetic oligonucleotide
  source 1..19: mol_type = other RNA
agcctccgctaggggaccc

SEQ ID NO: 3 - RNA, 19 nt, synthetic construct
  misc_feature 1..19: note = Description of Artificial Sequence: Synthetic oligonucleotide
  source 1..19: mol_type = other RNA
gcctccgctaggggacccc

SEQ ID NO: 4 - RNA, 19 nt, synthetic construct
  misc_feature 1..19: note = Description of Artificial Sequence: Synthetic oligonucleotide
  source 1..19: mol_type = other RNA
cctccgctaggggaccccc

SEQ ID NO: 5 - RNA, 19 nt, synthetic construct
  misc_feature 1..19: note = Description of Artificial Sequence: Synthetic oligonucleotide
  source 1..19: mol_type = other RNA
ctccgctaggggaccccct

SEQ ID NO: 6 - RNA, 19 nt, synthetic construct
  misc_feature 1..19: note = Description of Artificial Sequence: Synthetic oligonucleotide
  source 1..19: mol_type = other RNA
tccgctaggggaccccctc

SEQ ID NO: 7 - RNA, 19 nt, synthetic construct
  misc_feature 1..19: note = Description of Artificial Sequence: Synthetic oligonucleotide
  source 1..19: mol_type = other RNA
ccgctaggggaccccctcc

SEQ ID NO: 8 - RNA, 19 nt, synthetic construct
  misc_feature 1..19: note = Description of Artificial Sequence: Synthetic oligonucleotide
  source 1..19: mol_type = other RNA
cgctaggggaccccctcca

SEQ ID NO: 9 - RNA, 19 nt, synthetic construct
  misc_feature 1..19: note = Description of Artificial Sequence: Synthetic oligonucleotide
  source 1..19: mol_type = other RNA
gctaggggaccccctccat

SEQ ID NO: 10 - RNA, 19 nt, synthetic construct
  misc_feature 1..19: note = Description of Artificial Sequence: Synthetic oligonucleotide
  source 1..19: mol_type = other RNA
ctaggggaccccctccatg

SEQ ID NO: 11 - RNA, 19 nt, synthetic construct
  misc_feature 1..19: note = Description of Artificial Sequence: Synthetic oligonucleotide
  source 1..19: mol_type = other RNA
taggggaccccctccatgg

SEQ ID NO: 12 - RNA, 19 nt, synthetic construct
  misc_feature 1..19: note = Description of Artificial Sequence: Synthetic oligonucleotide
  source 1..19: mol_type = other RNA
aggggaccccctccatggc

SEQ ID NO: 13 - RNA, 19 nt, synthetic construct
  misc_feature 1..19: note = Description of Artificial Sequence: Synthetic oligonucleotide
  source 1..19: mol_type = other RNA
ggggaccccctccatggct

SEQ ID NO: 14 - RNA, 19 nt, synthetic construct
  misc_feature 1..19: note = Description of Artificial Sequence: Synthetic oligonucleotide
  source 1..19: mol_type = other RNA
gggaccccctccatggctt

SEQ ID NO: 15 - RNA, 19 nt, synthetic construct
  misc_feature 1..19: note = Description of Artificial Sequence: Synthetic oligonucleotide
  source 1..19: mol_type = other RNA
ggaccccctccatggcttc

SEQ ID NO: 16 - RNA, 19 nt, synthetic construct
  misc_feature 1..19: note = Description of Artificial Sequence: Synthetic oligonucleotide
  source 1..19: mol_type = other RNA
gaccccctccatggcttcc

SEQ ID NO: 17 - RNA, 19 nt, synthetic construct
  misc_feature 1..19: note = Description of Artificial Sequence: Synthetic oligonucleotide
  source 1..19: mol_type = other RNA
accccctccatggcttccc

SEQ ID NO: 18 - RNA, 19 nt, synthetic construct
  misc_feature 1..19: note = Description of Artificial Sequence: Synthetic oligonucleotide
  source 1..19: mol_type = other RNA
ccccctccatggcttccca

SEQ ID NO: 19 - RNA, 19 nt, synthetic construct
  misc_feature 1..19: note = Description of Artificial Sequence: Synthetic oligonucleotide
  source 1..19: mol_type = other RNA
cccctccatggcttcccac

SEQ ID NO: 20 - RNA, 19 nt, synthetic construct
  misc_feature 1..19: note = Description of Artificial Sequence: Synthetic oligonucleotide
  source 1..19: mol_type = other RNA
ccctccatggcttcccacc

SEQ ID NO: 21 - RNA, 19 nt, synthetic construct
  misc_feature 1..19: note = Description of Artificial Sequence: Synthetic oligonucleotide
  source 1..19: mol_type = other RNA
cctccatggcttcccaccg

SEQ ID NO: 22 - RNA, 19 nt, synthetic construct
  misc_feature 1..19: note = Description of Artificial Sequence: Synthetic oligonucleotide
  source 1..19: mol_type = other RNA
ctccatggcttcccaccgg

SEQ ID NO: 23 - RNA, 19 nt, synthetic construct
  misc_feature 1..19: note = Description of Artificial Sequence: Synthetic oligonucleotide
  source 1..19: mol_type = other RNA
tccatggcttcccaccggg

SEQ ID NO: 24 - RNA, 19 nt, synthetic construct
  misc_feature 1..19: note = Description of Artificial Sequence: Synthetic oligonucleotide
  source 1..19: mol_type = other RNA
ccatggcttcccaccgggt

SEQ ID NO: 25 - RNA, 19 nt, synthetic construct
  misc_feature 1..19: note = Description of Artificial Sequence: Synthetic oligonucleotide
  source 1..19: mol_type = other RNA
catggcttcccaccgggtt

SEQ ID NO: 26 - RNA, 19 nt, synthetic construct
  misc_feature 1..19: note = Description of Artificial Sequence: Synthetic oligonucleotide
  source 1..19: mol_type = other RNA
atggcttcccaccgggttg

SEQ ID NO: 27 - RNA, 19 nt, synthetic construct
  misc_feature 1..19: note = Description of Artificial Sequence: Synthetic oligonucleotide
  source 1..19: mol_type = other RNA
tggcttcccaccgggttgt

SEQ ID NO: 28 - RNA, 19 nt, synthetic construct
  misc_feature 1..19: note = Description of Artificial Sequence: Synthetic oligonucleotide
  source 1..19: mol_type = other RNA
ggcttcccaccgggttgtt

SEQ ID NO: 29 - RNA, 19 nt, synthetic construct
  misc_feature 1..19: note = Description of Artificial Sequence: Synthetic oligonucleotide
  source 1..19: mol_type = other RNA
gcttcccaccgggttgttc

SEQ ID NO: 30 - RNA, 19 nt, synthetic construct
  misc_feature 1..19: note = Description of Artificial Sequence: Synthetic oligonucleotide
  source 1..19: mol_type = other RNA
cttcccaccgggttgttcc

SEQ ID NO: 31 - RNA, 19 nt, synthetic construct
  misc_feature 1..19: note = Description of Artificial Sequence: Synthetic oligonucleotide
  source 1..19: mol_type = other RNA
ttcccaccgggttgttcca

SEQ ID NO: 32 - RNA, 19 nt, synthetic construct
  misc_feature 1..19: note = Description of Artificial Sequence: Synthetic oligonucleotide
  source 1..19: mol_type = other RNA
tcccaccgggttgttccag

SEQ ID NO: 33 - RNA, 19 nt, synthetic construct
  misc_feature 1..19: note = Description of Artificial Sequence: Synthetic oligonucleotide
  source 1..19: mol_type = other RNA
cccaccgggttgttccagg

SEQ ID NO: 34 - RNA, 19 nt, synthetic construct
  misc_feature 1..19: note = Description of Artificial Sequence: Synthetic oligonucleotide
  source 1..19: mol_type = other RNA
ccaccgggttgttccaggc

SEQ ID NO: 35 - RNA, 19 nt, synthetic construct
  misc_feature 1..19: note = Description of Artificial Sequence: Synthetic oligonucleotide
  source 1..19: mol_type = other RNA
caccgggttgttccaggcc

SEQ ID NO: 36 - RNA, 19 nt, synthetic construct
  misc_feature 1..19: note = Description of Artificial Sequence: Synthetic oligonucleotide
  source 1..19: mol_type = other RNA
accgggttgttccaggcct

SEQ ID NO: 37 - RNA, 19 nt, synthetic construct
  misc_feature 1..19: note = Description of Artificial Sequence: Synthetic oligonucleotide
  source 1..19: mol_type = other RNA
ccgggttgttccaggcctc

SEQ ID NO: 38 - RNA, 19 nt, synthetic construct
  misc_feature 1..19: note = Description of Artificial Sequence: Synthetic oligonucleotide
  source 1..19: mol_type = other RNA
cgggttgttccaggcctca

SEQ ID NO: 39 - RNA, 19 nt, synthetic construct
  misc_feature 1..19: note = Description of Artificial Sequence: Synthetic oligonucleotide
  source 1..19: mol_type = other RNA
gggttgttccaggcctcag

SEQ ID NO: 40 - RNA, 19 nt, synthetic construct
  misc_feature 1..19: note = Description of Artificial Sequence: Synthetic oligonucleotide
  source 1..19: mol_type = other RNA
ggttgttccaggcctcagc

SEQ ID NO: 41 - RNA, 19 nt, synthetic construct
  misc_feature 1..19: note = Description of Artificial Sequence: Synthetic oligonucleotide
  source 1..19: mol_type = other RNA
gttgttccaggcctcagct

SEQ ID NO: 42 - RNA, 19 nt, synthetic construct
  misc_feature 1..19: note = Description of Artificial Sequence: Synthetic oligonucleotide
  source 1..19: mol_type = other RNA
ttgttccaggcctcagctt

SEQ ID NO: 43 - RNA, 19 nt, synthetic construct
  misc_feature 1..19: note = Description of Artificial Sequence: Synthetic oligonucleotide
  source 1..19: mol_type = other RNA
tgttccaggcctcagcttc

SEQ ID NO: 44 - RNA, 19 nt, synthetic construct
  misc_feature 1..19: note = Description of Artificial Sequence: Synthetic oligonucleotide
  source 1..19: mol_type = other RNA
gttccaggcctcagcttcg

SEQ ID NO: 45 - RNA, 19 nt, synthetic construct
  misc_feature 1..19: note = Description of Artificial Sequence: Synthetic oligonucleotide
  source 1..19: mol_type = other RNA
ttccaggcctcagcttcgc

SEQ ID NO: 46 - RNA, 19 nt, synthetic construct
  misc_feature 1..19: note = Description of Artificial Sequence: Synthetic oligonucleotide
  source 1..19: mol_type = other RNA
tccaggcctcagcttcgcc

SEQ ID NO: 47 - RNA, 19 nt, synthetic construct
  misc_feature 1..19: note = Description of Artificial Sequence: Synthetic oligonucleotide
  source 1..19: mol_type = other RNA
ccaggcctcagcttcgccg

SEQ ID NO: 48 - RNA, 19 nt, synthetic construct
  misc_feature 1..19: note = Description of Artificial Sequence: Synthetic oligonucleotide
  source 1..19: mol_type = other RNA
caggcctcagcttcgccga

SEQ ID NO: 49 - RNA, 19 nt, synthetic construct
  misc_feature 1..19: note = Description of Artificial Sequence: Synthetic oligonucleotide
  source 1..19: mol_type = other RNA
aggcctcagcttcgccgaa

SEQ ID NO: 50 - RNA, 19 nt, synthetic construct
  misc_feature 1..19: note = Description of Artificial Sequence: Synthetic oligonucleotide
  source 1..19: mol_type = other RNA
ggcctcagcttcgccgaaa

SEQ ID NO: 51 - RNA, 19 nt, synthetic construct
  misc_feature 1..19: note = Description of Artificial Sequence: Synthetic oligonucleotide
  source 1..19: mol_type = other RNA
gcctcagcttcgccgaaag

SEQ ID NO: 52 - RNA, 19 nt, synthetic construct
  misc_feature 1..19: note = Description of Artificial Sequence: Synthetic oligonucleotide
  source 1..19: mol_type = other RNA
cctcagcttcgccgaaagg

SEQ ID NO: 53 - RNA, 19 nt, synthetic construct
  misc_feature 1..19: note = Description of Artificial Sequence: Synthetic oligonucleotide
  source 1..19: mol_type = other RNA
ctcagcttcgccgaaaggc

SEQ ID NO: 54 - RNA, 19 nt, synthetic construct
  misc_feature 1..19: note = Description of Artificial Sequence: Synthetic oligonucleotide
  source 1..19: mol_type = other RNA
tcagcttcgccgaaaggcc

SEQ ID NO: 55 - RNA, 19 nt, synthetic construct
  misc_feature 1..19: note = Description of Artificial Sequence: Synthetic oligonucleotide
  source 1..19: mol_type = other RNA
cagcttcgccgaaaggcct

SEQ ID NO: 56 - RNA, 19 nt, synthetic construct
  misc_feature 1..19: note = Description of Artificial Sequence: Synthetic oligonucleotide
  source 1..19: mol_type = other RNA
agcttcgccgaaaggcctc

SEQ ID NO: 57 - RNA, 19 nt, synthetic construct
  misc_feature 1..19: note = Description of Artificial Sequence: Synthetic oligonucleotide
  source 1..19: mol_type = other RNA
gcttcgccgaaaggcctca

SEQ ID NO: 58 - RNA, 19 nt, synthetic construct
  misc_feature 1..19: note = Description of Artificial Sequence: Synthetic oligonucleotide
  source 1..19: mol_type = other RNA
cttcgccgaaaggcctcac

SEQ ID NO: 59 - RNA, 19 nt, synthetic construct
  misc_feature 1..19: note = Description of Artificial Sequence: Synthetic oligonucleotide
  source 1..19: mol_type = other RNA
ttcgccgaaaggcctcacc

SEQ ID NO: 60 - RNA, 19 nt, synthetic construct
  misc_feature 1..19: note = Description of Artificial Sequence: Synthetic oligonucleotide
  source 1..19: mol_type = other RNA
tcgccgaaaggcctcacca

SEQ ID NO: 61 - RNA, 19 nt, synthetic construct
  misc_feature 1..19: note = Description of Artificial Sequence: Synthetic oligonucleotide
  source 1..19: mol_type = other RNA
cgccgaaaggcctcaccac

SEQ ID NO: 62 - RNA, 19 nt, synthetic construct
  misc_feature 1..19: note = Description of Artificial Sequence: Synthetic oligonucleotide
  source 1..19: mol_type = other RNA
gccgaaaggcctcaccacc

SEQ ID NO: 63 - RNA, 19 nt, synthetic construct
  misc_feature 1..19: note = Description of Artificial Sequence: Synthetic oligonucleotide
  source 1..19: mol_type = other RNA
ccgaaaggcctcaccacct

SEQ ID NO: 64 - RNA, 19 nt, synthetic construct
  misc_feature 1..19: note = Description of Artificial Sequence: Synthetic oligonucleotide
  source 1..19: mol_type = other RNA
cgaaaggcctcaccacctc

SEQ ID NO: 65 - RNA, 19 nt, synthetic construct
  misc_feature 1..19: note = Description of Artificial Sequence: Synthetic oligonucleotide
  source 1..19: mol_type = other RNA
gaaaggcctcaccacctcc

SEQ ID NO: 66 - RNA, 19 nt, synthetic construct
  misc_feature 1..19: note = Description of Artificial Sequence: Synthetic oligonucleotide
  source 1..19: mol_type = other RNA
aaaggcctcaccacctccg

SEQ ID NO: 67 - RNA, 19 nt, synthetic construct
  misc_feature 1..19: note = Description of Artificial Sequence: Synthetic oligonucleotide
  source 1..19: mol_type = other RNA
aaggcctcaccacctccga

SEQ ID NO: 68 - RNA, 19 nt, synthetic construct
  misc_feature 1..19: note = Description of Artificial Sequence: Synthetic oligonucleotide
  source 1..19: mol_type = other RNA
aggcctcaccacctccgac

SEQ ID NO: 69 - RNA, 19 nt, synthetic construct
  misc_feature 1..19: note = Description of Artificial Sequence: Synthetic oligonucleotide
  source 1..19: mol_type = other RNA
ggcctcaccacctccgacc

SEQ ID NO: 70 - RNA, 19 nt, synthetic construct
  misc_feature 1..19: note = Description of Artificial Sequence: Synthetic oligonucleotide
  source 1..19: mol_type = other RNA
gcctcaccacctccgacct

SEQ ID NO: 71 - RNA, 19 nt, synthetic construct
  misc_feature 1..19: note = Description of Artificial Sequence: Synthetic oligonucleotide
  source 1..19: mol_type = other RNA
cctcaccacctccgacctc

SEQ ID NO: 72 - RNA, 19 nt, synthetic construct
  misc_feature 1..19: note = Description of Artificial Sequence: Synthetic oligonucleotide
  source 1..19: mol_type = other RNA
ctcaccacctccgacctcc

SEQ ID NO: 73 - RNA, 19 nt, synthetic construct
  misc_feature 1..19: note = Description of Artificial Sequence: Synthetic oligonucleotide
  source 1..19: mol_type = other RNA
tcaccacctccgacctccg

SEQ ID NO: 74 - RNA, 19 nt, synthetic construct
  misc_feature 1..19: note = Description of Artificial Sequence: Synthetic oligonucleotide
  source 1..19: mol_type = other RNA
caccacctccgacctccgc

SEQ ID NO: 75 - RNA, 19 nt, synthetic construct
  misc_feature 1..19: note = Description of Artificial Sequence: Synthetic oligonucleotide
  source 1..19: mol_type = other RNA
accacctccgacctccgcc

SEQ ID NO: 76 - RNA, 19 nt, synthetic construct
  misc_feature 1..19: note = Description of Artificial Sequence: Synthetic oligonucleotide
  source 1..19: mol_type = other RNA
ccacctccgacctccgcct

SEQ ID NO: 77 - RNA, 19 nt, synthetic construct
  misc_feature 1..19: note = Description of Artificial Sequence: Synthetic oligonucleotide
  source 1..19: mol_type = other RNA
cacctccgacctccgcctg

SEQ ID NO: 78 - RNA, 19 nt, synthetic construct
  misc_feature 1..19: note = Description of Artificial Sequence: Synthetic oligonucleotide
  source 1..19: mol_type = other RNA
acctccgacctccgcctgc

SEQ ID NO: 79 - RNA, 19 nt, synthetic construct
  misc_feature 1..19: note = Description of Artificial Sequence: Synthetic oligonucleotide
  source 1..19: mol_type = other RNA
cctccgacctccgcctgct

SEQ ID NO: 80 - RNA, 19 nt, synthetic construct
  misc_feature 1..19: note = Description of Artificial Sequence: Synthetic oligonucleotide
  source 1..19: mol_type = other RNA
ctccgacctccgcctgctc

SEQ ID NO: 81 - RNA, 19 nt, synthetic construct
  misc_feature 1..19: note = Description of Artificial Sequence: Synthetic oligonucleotide
  source 1..19: mol_type = other RNA
tccgacctccgcctgctct

SEQ ID NO: 82 - RNA, 19 nt, synthetic construct
  misc_feature 1..19: note = Description of Artificial Sequence: Synthetic oligonucleotide
  source 1..19: mol_type = other RNA
ccgacctccgcctgctctg

SEQ ID NO: 83 - RNA, 19 nt, synthetic construct
  misc_feature 1..19: note = Description of Artificial Sequence: Synthetic oligonucleotide
  source 1..19: mol_type = other RNA
cgacctccgcctgctctgg

SEQ ID NO: 84 - RNA, 19 nt, synthetic construct
  misc_feature 1..19: note = Description of Artificial Sequence: Synthetic oligonucleotide
  source 1..19: mol_type = other RNA
gacctccgcctgctctggg

SEQ ID NO: 85 - RNA, 19 nt, synthetic construct
  misc_feature 1..19: note = Description of Artificial Sequence: Synthetic oligonucleotide
  source 1..19: mol_type = other RNA
acctccgcctgctctgggg

SEQ ID NO: 86 - RNA, 19 nt, synthetic construct
  misc_feature 1..19: note = Description of Artificial Sequence: Synthetic oligonucleotide
  source 1..19: mol_type = other RNA
cctccgcctgctctgggga

SEQ ID NO: 87 - RNA, 19 nt, synthetic construct
  misc_feature 1..19: note = Description of Artificial Sequence: Synthetic oligonucleotide
  source 1..19: mol_type = other RNA
ctccgcctgctctggggat

SEQ ID NO: 88 - RNA, 19 nt, synthetic construct
  misc_feature 1..19: note = Description of Artificial Sequence: Synthetic oligonucleotide
  source 1..19: mol_type = other RNA
tccgcctgctctggggatg

SEQ ID NO: 89 - RNA, 19 nt, synthetic construct
  misc_feature 1..19: note = Description of Artificial Sequence: Synthetic oligonucleotide
  source 1..19: mol_type = other RNA
ccgcctgctctggggatgc

SEQ ID NO: 90 - RNA, 19 nt, synthetic construct
  misc_feature 1..19: note = Description of Artificial Sequence: Synthetic oligonucleotide
  source 1..19: mol_type = other RNA
cgcctgctctggggatgct

SEQ ID NO: 91 - RNA, 19 nt, synthetic construct
  misc_feature 1..19: note = Description of Artificial Sequence: Synthetic oligonucleotide
  source 1..19: mol_type = other RNA
gcctgctctggggatgctc

SEQ ID NO: 92 - RNA, 19 nt, synthetic construct
  misc_feature 1..19: note = Description of Artificial Sequence: Synthetic oligonucleotide
  source 1..19: mol_type = other RNA
cctgctctggggatgctcc

SEQ ID NO: 93 - RNA, 19 nt, synthetic construct
  misc_feature 1..19: note = Description of Artificial Sequence: Synthetic oligonucleotide
  source 1..19: mol_type = other RNA
ctgctctggggatgctccc

SEQ ID NO: 94 - RNA, 19 nt, synthetic construct
  misc_feature 1..19: note = Description of Artificial Sequence: Synthetic oligonucleotide
  source 1..19: mol_type = other RNA
tgctctggggatgctccca

SEQ ID NO: 95 - RNA, 19 nt, synthetic construct
  misc_feature 1..19: note = Description of Artificial Sequence: Synthetic oligonucleotide
  source 1..19: mol_type = other RNA
gctctggggatgctcccag

SEQ ID NO: 96 - RNA, 19 nt, synthetic construct
  misc_feature 1..19: note = Description of Artificial Sequence: Synthetic oligonucleotide
  source 1..19: mol_type = other RNA
ctctggggatgctcccagc

SEQ ID NO: 97 - RNA, 19 nt, synthetic construct
  misc_feature 1..19: note = Description of Artificial Sequence: Synthetic oligonucleotide
  source 1..19: mol_type = other RNA
tctggggatgctcccagcc

SEQ ID NO: 98 - RNA, 19 nt, synthetic construct
  misc_feature 1..19: note = Description of Artificial Sequence: Synthetic oligonucleotide
  source 1..19: mol_type = other RNA
ctggggatgctcccagccc

SEQ ID NO: 99 - RNA, 19 nt, synthetic construct
  misc_feature 1..19: note = Description of Artificial Sequence: Synthetic oligonucleotide
  source 1..19: mol_type = other RNA
tggggatgctcccagccct

SEQ ID NO: 100 - RNA, 19 nt, synthetic construct
  misc_feature 1..19: note = Description of Artificial Sequence: Synthetic oligonucleotide
  source 1..19: mol_type = other RNA
ggggatgctcccagccctg

SEQ ID NO: 101 - RNA, 19 nt, synthetic construct
  misc_feature 1..19: note = Description of Artificial Sequence: Synthetic oligonucleotide
  source 1..19: mol_type = other RNA
gggatgctcccagccctgc

SEQ ID NO: 102 - RNA, 19 nt, synthetic construct
  misc_feature 1..19: note = Description of Artificial Sequence: Synthetic oligonucleotide
  source 1..19: mol_type = other RNA
ggatgctcccagccctgct

SEQ ID NO: 103 - RNA, 19 nt, synthetic construct
  misc_feature 1..19: note = Description of Artificial Sequence: Synthetic oligonucleotide
  source 1..19: mol_type = other RNA
gatgctcccagccctgctg

SEQ ID NO: 104 - RNA, 19 nt, synthetic construct
  misc_feature 1..19: note = Description of Artificial Sequence: Synthetic oligonucleotide
  source 1..19: mol_type = other RNA
atgctcccagccctgctgc

SEQ ID NO: 105 - RNA, 19 nt, synthetic construct
  misc_feature 1..19: note = Description of Artificial Sequence: Synthetic oligonucleotide
  source 1..19: mol_type = other RNA
tgctcccagccctgctgcg

SEQ ID NO: 106 - RNA, 19 nt, synthetic construct
  misc_feature 1..19: note = Description of Artificial Sequence: Synthetic oligonucleotide
  source 1..19: mol_type = other RNA
gctcccagccctgctgcgg

SEQ ID NO: 107 - RNA, 19 nt, synthetic construct
  misc_feature 1..19: note = Description of Artificial Sequence: Synthetic oligonucleotide
  source 1..19: mol_type = other RNA
ctcccagccctgctgcggc

SEQ ID NO: 108 - RNA, 19 nt, synthetic construct
  misc_feature 1..19: note = Description of Artificial Sequence: Synthetic oligonucleotide
  source 1..19: mol_type = other RNA
tcccagccctgctgcggca

SEQ ID NO: 109 - RNA, 19 nt, synthetic construct
  misc_feature 1..19: note = Description of Artificial Sequence: Synthetic oligonucleotide
  source 1..19: mol_type = other RNA
cccagccctgctgcggcag

SEQ ID NO: 110 - RNA, 19 nt, synthetic construct
  misc_feature 1..19: note = Description of Artificial Sequence: Synthetic oligonucleotide
  source 1..19: mol_type = other RNA
ccagccctgctgcggcaga

SEQ ID NO: 111 - RNA, 19 nt, synthetic construct
  misc_feature 1..19: note = Description of Artificial Sequence: Synthetic oligonucleotide
  source 1..19: mol_type = other RNA
cagccctgctgcggcagaa

SEQ ID NO: 112 - RNA, 19 nt, synthetic construct
  misc_feature 1..19: note = Description of Artificial Sequence: Synthetic oligonucleotide
  source 1..19: mol_type = other RNA
agccctgctgcggcagaac

SEQ ID NO: 113 - RNA, 19 nt, synthetic construct
  misc_feature 1..19: note = Description of Artificial Sequence: Synthetic oligonucleotide
  source 1..19: mol_type = other RNA
gccctgctgcggcagaacg

SEQ ID NO: 114 - RNA, 19 nt, synthetic construct
  misc_feature 1..19: note = Description of Artificial Sequence: Synthetic oligonucleotide
  source 1..19: mol_type = other RNA
ccctgctgcggcagaacgc

SEQ ID NO: 115 - RNA, 19 nt, synthetic construct
  misc_feature 1..19: note = Description of Artificial Sequence: Synthetic oligonucleotide
  source 1..19: mol_type = other RNA
cctgctgcggcagaacgcg

SEQ ID NO: 116 - RNA, 19 nt, synthetic construct
  misc_feature 1..19: note = Description of Artificial Sequence: Synthetic oligonucleotide
  source 1..19: mol_type = other RNA
ctgctgcggcagaacgcga

SEQ ID NO: 117 - RNA, 19 nt, synthetic construct
  misc_feature 1..19: note = Description of Artificial Sequence: Synthetic oligonucleotide
  source 1..19: mol_type = other RNA
tgctgcggcagaacgcgac

SEQ ID NO: 118 - RNA, 19 nt, synthetic construct
  misc_feature 1..19: note = Description of Artificial Sequence: Synthetic oligonucleotide
  source 1..19: mol_type = other RNA
gctgcggcagaacgcgaca

SEQ ID NO: 119 - RNA, 19 nt, synthetic construct
  misc_feature 1..19: note = Description of Artificial Sequence: Synthetic oligonucleotide
  source 1..19: mol_type = other RNA
ctgcggcagaacgcgacat

SEQ ID NO: 120 - RNA, 19 nt, synthetic construct
  misc_feature 1..19: note = Description of Artificial Sequence: Synthetic oligonucleotide
  source 1..19: mol_type = other RNA
tgcggcagaacgcgacatg

SEQ ID NO: 121 - RNA, 19 nt, synthetic construct
  misc_feature 1..19: note = Description of Artificial Sequence: Synthetic oligonucleotide
  source 1..19: mol_type = other RNA
gcggcagaacgcgacatgc

SEQ ID NO: 122 - RNA, 19 nt, synthetic construct
  misc_feature 1..19: note = Description of Artificial Sequence: Synthetic oligonucleotide
  source 1..19: mol_type = other RNA
cggcagaacgcgacatgct

SEQ ID NO: 123 - RNA, 19 nt, synthetic construct
  misc_feature 1..19: note = Description of Artificial Sequence: Synthetic oligonucleotide
  source 1..19: mol_type = other RNA
ggcagaacgcgacatgcta

SEQ ID NO: 124 - RNA, 19 nt, synthetic construct
  misc_feature 1..19: note = Description of Artificial Sequence: Synthetic oligonucleotide
  source 1..19: mol_type = other RNA
gcagaacgcgacatgctaa

SEQ ID NO: 125 - RNA, 19 nt, synthetic construct
  misc_feature 1..19: note = Description of Artificial Sequence: Synthetic oligonucleotide
  source 1..19: mol_type = other RNA
cagaacgcgacatgctaac

SEQ ID NO: 126 - RNA, 19 nt, synthetic construct
  misc_feature 1..19: note = Description of Artificial Sequence: Synthetic oligonucleotide
  source 1..19: mol_type = other RNA
agaacgcgacatgctaacc

SEQ ID NO: 127 - RNA, 19 nt, synthetic construct
  misc_feature 1..19: note = Description of Artificial Sequence: Synthetic oligonucleotide
  source 1..19: mol_type = other RNA
gaacgcgacatgctaaccg

SEQ ID NO: 128 - RNA, 19 nt, synthetic construct
  misc_feature 1..19: note = Description of Artificial Sequence: Synthetic oligonucleotide
  source 1..19: mol_type = other RNA
aacgcgacatgctaaccgg

SEQ ID NO: 129 - RNA, 19 nt, synthetic construct
  misc_feature 1..19: note = Description of Artificial Sequence: Synthetic oligonucleotide
  source 1..19: mol_type = other RNA
acgcgacatgctaaccgga

SEQ ID NO: 130 - RNA, 19 nt, synthetic construct
  misc_feature 1..19: note = Description of Artificial Sequence: Synthetic oligonucleotide
  source 1..19: mol_type = other RNA
cgcgacatgctaaccggaa

SEQ ID NO: 131 - RNA, 19 nt, synthetic construct
  misc_feature 1..19: note = Description of Artificial Sequence: Synthetic oligonucleotide
  source 1..19: mol_type = other RNA
gcgacatgctaaccggaat

SEQ ID NO: 132 - RNA, 19 nt, synthetic construct
  misc_feature 1..19: note = Description of Artificial Sequence: Synthetic oligonucleotide
  source 1..19: mol_type = other RNA
cgacatgctaaccggaatc

SEQ ID NO: 133 - RNA, 19 nt, synthetic construct
  misc_feature 1..19: note = Description of Artificial Sequence: Synthetic oligonucleotide
  source 1..19: mol_type = other RNA
gacatgctaaccggaatcc

SEQ ID NO: 134 - RNA, 19 nt, synthetic construct
  misc_feature 1..19: note = Description of Artificial Sequence: Synthetic oligonucleotide
  source 1..19: mol_type = other RNA
acatgctaaccggaatccc

SEQ ID NO: 135 - RNA, 19 nt, synthetic construct
  misc_feature 1..19: note = Description of Artificial Sequence: Synthetic oligonucleotide
  source 1..19: mol_type = other RNA
catgctaaccggaatccct

SEQ ID NO: 136 - RNA, 19 nt, synthetic construct
  misc_feature 1..19: note = Description of Artificial Sequence: Synthetic oligonucleotide
  source 1..19: mol_type = other RNA
atgctaaccggaatcccta

SEQ ID NO: 137 - RNA, 19 nt, synthetic construct
  misc_feature 1..19: note = Description of Artificial Sequence: Synthetic oligonucleotide
  source 1..19: mol_type = other RNA
tgctaaccggaatccctag

SEQ ID NO: 138 - RNA, 19 nt, synthetic construct
  misc_feature 1..19: note = Description of Artificial Sequence: Synthetic oligonucleotide
  source 1..19: mol_type = other RNA
gctaaccggaatccctagg

SEQ ID NO: 139 - RNA, 19 nt, synthetic construct
  misc_feature 1..19: note = Description of Artificial Sequence: Synthetic oligonucleotide
  source 1..19: mol_type = other RNA
ctaaccggaatccctaggc

SEQ ID NO: 140 - RNA, 19 nt, synthetic construct
  misc_feature 1..19: note = Description of Artificial Sequence: Synthetic oligonucleotide
  source 1..19: mol_type = other RNA
taaccggaatccctaggcc

SEQ ID NO: 141 - RNA, 19 nt, synthetic construct
  misc_feature 1..19: note = Description of Artificial Sequence: Synthetic oligonucleotide
  source 1..19: mol_type = other RNA
aaccggaatccctaggccg

SEQ ID NO: 142 - RNA, 19 nt, synthetic construct
  misc_feature 1..19: note = Description of Artificial Sequence: Synthetic oligonucleotide
  source 1..19: mol_type = other RNA
accggaatccctaggccgc

SEQ ID NO: 143 - RNA, 19 nt, synthetic construct
  misc_feature 1..19: note = Description of Artificial Sequence: Synthetic oligonucleotide
  source 1..19: mol_type = other RNA
ccggaatccctaggccgcc

SEQ ID NO: 144 - RNA, 19 nt, synthetic construct
  misc_feature 1..19: note = Description of Artificial Sequence: Synthetic oligonucleotide
  source 1..19: mol_type = other RNA
cggaatccctaggccgcct

SEQ ID NO: 145 - RNA, 19 nt, synthetic construct
  misc_feature 1..19: note = Description of Artificial Sequence: Synthetic oligonucleotide
  source 1..19: mol_type = other RNA
ggaatccctaggccgcctg

SEQ ID NO: 146 - RNA, 19 nt, synthetic construct
  misc_feature 1..19: note = Description of Artificial Sequence: Synthetic oligonucleotide
  source 1..19: mol_type = other RNA
gaatccctaggccgcctgt

SEQ ID NO: 147 - RNA, 19 nt, synthetic construct
  misc_feature 1..19: note = Description of Artificial Sequence: Synthetic oligonucleotide
  source 1..19: mol_type = other RNA
aatccctaggccgcctgtc

SEQ ID NO: 148 - RNA, 19 nt, synthetic construct
  misc_feature 1..19: note = Description of Artificial Sequence: Synthetic oligonucleotide
  source 1..19: mol_type = other RNA
atccctaggccgcctgtct

SEQ ID NO: 149 - RNA, 19 nt, synthetic construct
  misc_feature 1..19: note = Description of Artificial Sequence: Synthetic oligonucleotide
  source 1..19: mol_type = other RNA
tccctaggccgcctgtctc

SEQ ID NO: 150 - RNA, 19 nt, synthetic construct
  misc_feature 1..19: note = Description of Artificial Sequence: Synthetic oligonucleotide
  source 1..19: mol_type = other RNA
ccctaggccgcctgtctcc

SEQ ID NO: 151 - RNA, 19 nt, synthetic construct
  misc_feature 1..19: note = Description of Artificial Sequence: Synthetic oligonucleotide
  source 1..19: mol_type = other RNA
cctaggccgcctgtctcct

SEQ ID NO: 152 - RNA, 19 nt, synthetic construct
  misc_feature 1..19: note = Description of Artificial Sequence: Synthetic oligonucleotide
  source 1..19: mol_type = other RNA
ctaggccgcctgtctccta

SEQ ID NO: 153 - RNA, 19 nt, synthetic construct
  misc_feature 1..19: note = Description of Artificial Sequence: Synthetic oligonucleotide
  source 1..19: mol_type = other RNA
taggccgcctgtctcctac

SEQ ID NO: 154 - RNA, 19 nt, synthetic construct
  misc_feature 1..19: note = Description of Artificial Sequence: Synthetic oligonucleotide
  source 1..19: mol_type = other RNA
aggccgcctgtctcctacc

SEQ ID NO: 155 - RNA, 19 nt, synthetic construct
  misc_feature 1..19: note = Description of Artificial Sequence: Synthetic oligonucleotide
  source 1..19: mol_type = other RNA
ggccgcctgtctcctaccc

SEQ ID NO: 156 - RNA, 19 nt, synthetic construct
  misc_feature 1..19: note = Description of Artificial Sequence: Synthetic oligonucleotide
  source 1..19: mol_type = other RNA
gccgcctgtctcctaccca

SEQ ID NO: 157 - RNA, 19 nt, synthetic construct
  misc_feature 1..19: note = Description of Artificial Sequence: Synthetic oligonucleotide
  source 1..19: mol_type = other RNA
ccgcctgtctcctacccat

SEQ ID NO: 158 - RNA, 19 nt, synthetic construct
  misc_feature 1..19: note = Description of Artificial Sequence: Synthetic oligonucleotide
  source 1..19: mol_type = other RNA
cgcctgtctcctacccata

SEQ ID NO: 159 - RNA, 19 nt, synthetic construct
  misc_feature 1..19: note = Description of Artificial Sequence: Synthetic oligonucleotide
  source 1..19: mol_type = other RNA
gcctgtctcctacccatac

SEQ ID NO: 160 - RNA, 19 nt, synthetic construct
  misc_feature 1..19: note = Description of Artificial Sequence: Synthetic oligonucleotide
  source 1..19: mol_type = other RNA
cctgtctcctacccatact

SEQ ID NO: 161 - RNA, 19 nt, synthetic construct
  misc_feature 1..19: note = Description of Artificial Sequence: Synthetic oligonucleotide
  source 1..19: mol_type = other RNA
ctgtctcctacccatactt

SEQ ID NO: 162 - RNA, 19 nt, synthetic construct
  misc_feature 1..19: note = Description of Artificial Sequence: Synthetic oligonucleotide
  source 1..19: mol_type = other RNA
tgtctcctacccatactta

SEQ ID NO: 163 - RNA, 19 nt, synthetic construct
  misc_feature 1..19: note = Description of Artificial Sequence: Synthetic oligonucleotide
  source 1..19: mol_type = other RNA
gtctcctacccatacttag

SEQ ID NO: 164 - RNA, 19 nt, synthetic construct
  misc_feature 1..19: note = Description of Artificial Sequence: Synthetic oligonucleotide
  source 1..19: mol_type = other RNA
tctcctacccatacttaga

SEQ ID NO: 165 - RNA, 19 nt, synthetic construct
  misc_feature 1..19: note = Description of Artificial Sequence: Synthetic oligonucleotide
  source 1..19: mol_type = other RNA
ctcctacccatacttagag

SEQ ID NO: 166 - RNA, 19 nt, synthetic construct
  misc_feature 1..19: note = Description of Artificial Sequence: Synthetic oligonucleotide
  source 1..19: mol_type = other RNA
tcctacccatacttagagg

SEQ ID NO: 167 - RNA, 19 nt, synthetic construct
  misc_feature 1..19: note = Description of Artificial Sequence: Synthetic oligonucleotide
  source 1..19: mol_type = other RNA
cctacccatacttagaggc

SEQ ID NO: 168 - RNA, 19 nt, synthetic construct
  misc_feature 1..19: note = Description of Artificial Sequence: Synthetic oligonucleotide
  source 1..19: mol_type = other RNA
ctacccatacttagaggcc

SEQ ID NO: 169 - RNA, 19 nt, synthetic construct
  misc_feature 1..19: note = Description of Artificial Sequence: Synthetic oligonucleotide
  source 1..19: mol_type = other RNA
tacccatacttagaggccc

SEQ ID NO: 170 - RNA, 19 nt, synthetic construct
  misc_feature 1..19: note = Description of Artificial Sequence: Synthetic oligonucleotide
  source 1..19: mol_type = other RNA
acccatacttagaggcccc

SEQ ID NO: 171 - RNA, 19 nt, synthetic construct
  misc_feature 1..19: note = Description of Artificial Sequence: Synthetic oligonucleotide
  source 1..19: mol_type = other RNA
cccatacttagaggccccg

SEQ ID NO: 172 - RNA, 19 nt, synthetic construct
  misc_feature 1..19: note = Description of Artificial Sequence: Synthetic oligonucleotide
  source 1..19: mol_type = other RNA
ccatacttagaggccccgc

SEQ ID NO: 173 - RNA, 19 nt, synthetic construct
  misc_feature 1..19: note = Description of Artificial Sequence: Synthetic oligonucleotide
  source 1..19: mol_type = other RNA
catacttagaggccccgct

SEQ ID NO: 174 - RNA, 19 nt, synthetic construct
  misc_feature 1..19: note = Description of Artificial Sequence: Synthetic oligonucleotide
  source 1..19: mol_type = other RNA
atacttagaggccccgctc

SEQ ID NO: 175 - RNA, 19 nt, synthetic construct
  misc_feature 1..19: note = Description of Artificial Sequence: Synthetic oligonucleotide
  source 1..19: mol_type = other RNA
tacttagaggccccgctca

SEQ ID NO: 176 - RNA, 19 nt, synthetic construct
  misc_feature 1..19: note = Description of Artificial Sequence: Synthetic oligonucleotide
  source 1..19: mol_type = other RNA
acttagaggccccgctcag

SEQ ID NO: 177 - RNA, 19 nt, synthetic construct
  misc_feature 1..19: note = Description of Artificial Sequence: Synthetic oligonucleotide
  source 1..19: mol_type = other RNA
cttagaggccccgctcaga

SEQ ID NO: 178 - RNA, 19 nt, synthetic construct
  misc_feature 1..19: note = Description of Artificial Sequence: Synthetic oligonucleotide
  source 1..19: mol_type = other RNA
ttagaggccccgctcagac

SEQ ID NO: 179 - RNA, 19 nt, synthetic construct
  misc_feature 1..19: note = Description of Artificial Sequence: Synthetic oligonucleotide
  source 1..19: mol_type = other RNA
tagaggccccgctcagacg

SEQ ID NO: 180 - RNA, 19 nt, synthetic construct
  misc_feature 1..19: note = Description of Artificial Sequence: Synthetic oligonucleotide
  source 1..19: mol_type = other RNA
agaggccccgctcagacgg

SEQ ID NO: 181 - RNA, 19 nt, synthetic construct
  misc_feature 1..19: note = Description of Artificial Sequence: Synthetic oligonucleotide
  source 1..19: mol_type = other RNA
gaggccccgctcagacggt

SEQ ID NO: 182 - RNA, 19 nt, synthetic construct
  misc_feature 1..19: note = Description of Artificial Sequence: Synthetic oligonucleotide
  source 1..19: mol_type = other RNA
aggccccgctcagacggtc

SEQ ID NO: 183 - RNA, 19 nt, synthetic construct
  misc_feature 1..19: note = Description of Artificial Sequence: Synthetic oligonucleotide
  source 1..19: mol_type = other RNA
ggccccgctcagacggtcc

SEQ ID NO: 184 - RNA, 19 nt, synthetic construct
  misc_feature 1..19: note = Description of Artificial Sequence: Synthetic oligonucleotide
  source 1..19: mol_type = other RNA
gccccgctcagacggtcct

SEQ ID NO: 185 - RNA, 19 nt, synthetic construct
  misc_feature 1..19: note = Description of Artificial Sequence: Synthetic oligonucleotide
  source 1..19: mol_type = other RNA
ccccgctcagacggtcctt

SEQ ID NO: 186 - RNA, 19 nt, synthetic construct
  misc_feature 1..19: note = Description of Artificial Sequence: Synthetic oligonucleotide
  source 1..19: mol_type = other RNA
cccgctcagacggtcctta

SEQ ID NO: 187 - RNA, 19 nt, synthetic construct
  misc_feature 1..19: note = Description of Artificial Sequence: Synthetic oligonucleotide
  source 1..19: mol_type = other RNA
ccgctcagacggtccttaa

SEQ ID NO: 188 - RNA, 19 nt, synthetic construct
  misc_feature 1..19: note = Description of Artificial Sequence: Synthetic oligonucleotide
  source 1..19: mol_type = other RNA
cgctcagacggtccttaaa

SEQ ID NO: 189 - RNA, 19 nt, synthetic construct
  misc_feature 1..19: note = Description of Artificial Sequence: Synthetic oligonucleotide
  source 1..19: mol_type = other RNA
gctcagacggtccttaaaa

SEQ ID NO: 190 - RNA, 19 nt, synthetic construct
  misc_feature 1..19: note = Description of Artificial Sequence: Synthetic oligonucleotide
  source 1..19: mol_type = other RNA
ctcagacggtccttaaaac

SEQ ID NO: 191 - RNA, 19 nt, synthetic construct
  misc_feature 1..19: note = Description of Artificial Sequence: Synthetic oligonucleotide
  source 1..19: mol_type = other RNA
tcagacggtccttaaaacg

SEQ ID NO: 192 - RNA, 19 nt, synthetic construct
  misc_feature 1..19: note = Description of Artificial Sequence: Synthetic oligonucleotide
  source 1..19: mol_type = other RNA
cagacggtccttaaaacgt

SEQ ID NO: 193 - RNA, 19 nt, synthetic construct
  misc_feature 1..19: note = Description of Artificial Sequence: Synthetic oligonucleotide
  source 1..19: mol_type = other RNA
agacggtccttaaaacgtc

SEQ ID NO: 194 - RNA, 19 nt, synthetic construct
  misc_feature 1..19: note = Description of Artificial Sequence: Synthetic oligonucleotide
  source 1..19: mol_type = other RNA
gacggtccttaaaacgtct

SEQ ID NO: 195 - RNA, 19 nt, synthetic construct
  misc_feature 1..19: note = Description of Artificial Sequence: Synthetic oligonucleotide
  source 1..19: mol_type = other RNA
acggtccttaaaacgtctg

SEQ ID NO: 196 - RNA, 19 nt, synthetic construct
  misc_feature 1..19: note = Description of Artificial Sequence: Synthetic oligonucleotide
  source 1..19: mol_type = other RNA
cggtccttaaaacgtctga

SEQ ID NO: 197 - RNA, 19 nt, synthetic construct
  misc_feature 1..19: note = Description of Artificial Sequence: Synthetic oligonucleotide
  source 1..19: mol_type = other RNA
ggtccttaaaacgtctgaa

SEQ ID NO: 198 - RNA, 19 nt, synthetic construct
  misc_feature 1..19: note = Description of Artificial Sequence: Synthetic oligonucleotide
  source 1..19: mol_type = other RNA
gtccttaaaacgtctgaaa

SEQ ID NO: 199 - RNA, 19 nt, synthetic construct
  misc_feature 1..19: note = Description of Artificial Sequence: Synthetic oligonucleotide
  source 1..19: mol_type = other RNA
tccttaaaacgtctgaaag

SEQ ID NO: 200 - RNA, 19 nt, synthetic construct
  misc_feature 1..19: note = Description of Artificial Sequence: Synthetic oligonucleotide
  source 1..19: mol_type = other RNA
ccttaaaacgtctgaaagg

SEQ ID NO: 201 - RNA, 19 nt, synthetic construct
  misc_feature 1..19: note = Description of Artificial Sequence: Synthetic oligonucleotide
  source 1..19: mol_type = other RNA
cttaaaacgtctgaaaggc

SEQ ID NO: 202 - RNA, 19 nt, synthetic construct
  misc_feature 1..19: note = Description of Artificial Sequence: Synthetic oligonucleotide
  source 1..19: mol_type = other RNA
ttaaaacgtctgaaaggcc

SEQ ID NO: 203 - RNA, 19 nt, synthetic construct
  misc_feature 1..19: note = Description of Artificial Sequence: Synthetic oligonucleotide
  source 1..19: mol_type = other RNA
taaaacgtctgaaaggccg

SEQ ID NO: 204 - RNA, 19 nt, synthetic construct
  misc_feature 1..19: note = Description of Artificial Sequence: Synthetic oligonucleotide
  source 1..19: mol_type = other RNA
aaaacgtctgaaaggccgt

SEQ ID NO: 205 - RNA, 19 nt, synthetic construct
  misc_feature 1..19: note = Description of Artificial Sequence: Synthetic oligonucleotide
  source 1..19: mol_type = other RNA
aaacgtctgaaaggccgtt

SEQ ID NO: 206 - RNA, 19 nt, synthetic construct
  misc_feature 1..19: note = Description of Artificial Sequence: Synthetic oligonucleotide
  source 1..19: mol_type = other RNA
aacgtctgaaaggccgttc

SEQ ID NO: 207 - RNA, 19 nt, synthetic construct
  misc_feature 1..19: note = Description of Artificial Sequence: Synthetic oligonucleotide
  source 1..19: mol_type = other RNA
acgtctgaaaggccgttcc

SEQ ID NO: 208 - RNA, 19 nt, synthetic construct
  misc_feature 1..19: note = Description of Artificial Sequence: Synthetic oligonucleotide
  source 1..19: mol_type = other RNA
cgtctgaaaggccgttcct

SEQ ID NO: 209 - RNA, 19 nt, synthetic construct
  misc_feature 1..19: note = Description of Artificial Sequence: Synthetic oligonucleotide
  source 1..19: mol_type = other RNA
gtctgaaaggccgttcctg

SEQ ID NO: 210 - RNA, 19 nt, synthetic construct
  misc_feature 1..19: note = Description of Artificial Sequence: Synthetic oligonucleotide
  source 1..19: mol_type = other RNA
tctgaaaggccgttcctgc

SEQ ID NO: 211 - RNA, 19 nt, synthetic construct
  misc_feature 1..19: note = Description of Artificial Sequence: Synthetic oligonucleotide
  source 1..19: mol_type = other RNA
ctgaaaggccgttcctgcc

SEQ ID NO: 212 - RNA, 19 nt, synthetic construct
  misc_feature 1..19: note = Description of Artificial Sequence: Synthetic oligonucleotide
  source 1..19: mol_type = other RNA
tgaaaggccgttcctgcca

SEQ ID NO: 213 - RNA, 19 nt, synthetic construct
  misc_feature 1..19: note = Description of Artificial Sequence: Synthetic oligonucleotide
  source 1..19: mol_type = other RNA
gaaaggccgttcctgccag

SEQ ID NO: 214 - RNA, 19 nt, synthetic construct
  misc_feature 1..19: note = Description of Artificial Sequence: Synthetic oligonucleotide
  source 1..19: mol_type = other RNA
aaaggccgttcctgccaga

SEQ ID NO: 215 - RNA, 19 nt, synthetic construct
  misc_feature 1..19: note = Description of Artificial Sequence: Synthetic oligonucleotide
  source 1..19: mol_type = other RNA
aaggccgttcctgccagag

SEQ ID NO: 216 - RNA, 19 nt, synthetic construct
  misc_feature 1..19: note = Description of Artificial Sequence: Synthetic oligonucleotide
  source 1..19: mol_type = other RNA
aggccgttcctgccagagt

SEQ ID NO: 217 - RNA, 19 nt, synthetic construct
  misc_feature 1..19: note = Description of Artificial Sequence: Synthetic oligonucleotide
  source 1..19: mol_type = other RNA
ggccgttcctgccagagtc

SEQ ID NO: 218 - RNA, 19 nt, synthetic construct
  misc_feature 1..19: note = Description of Artificial Sequence: Synthetic oligonucleotide
  source 1..19: mol_type = other RNA
gccgttcctgccagagtcc

SEQ ID NO: 219 - RNA, 19 nt, synthetic construct
  misc_feature 1..19: note = Description of Artificial Sequence: Synthetic oligonucleotide
  source 1..19: mol_type = other RNA
ccgttcctgccagagtccc

SEQ ID NO: 220 - RNA, 19 nt, synthetic construct
  misc_feature 1..19: note = Description of Artificial Sequence: Synthetic oligonucleotide
  source 1..19: mol_type = other RNA
cgttcctgccagagtccct

SEQ ID NO: 221 - RNA, 19 nt, synthetic construct
  misc_feature 1..19: note = Description of Artificial Sequence: Synthetic oligonucleotide
  source 1..19: mol_type = other RNA
gttcctgccagagtccctg

SEQ ID NO: 222 - RNA, 19 nt, synthetic construct
  misc_feature 1..19: note = Description of Artificial Sequence: Synthetic oligonucleotide
  source 1..19: mol_type = other RNA
ttcctgccagagtccctgc

SEQ ID NO: 223 - RNA, 19 nt, synthetic construct
  misc_feature 1..19: note = Description of Artificial Sequence: Synthetic oligonucleotide
  source 1..19: mol_type = other RNA
tcctgccagagtccctgct

SEQ ID NO: 224 - RNA, 19 nt, synthetic construct
  misc_feature 1..19: note = Description of Artificial Sequence: Synthetic oligonucleotide
  source 1..19: mol_type = other RNA
cctgccagagtccctgcta

SEQ ID NO: 225 - RNA, 19 nt, synthetic construct
  misc_feature 1..19: note = Description of Artificial Sequence: Synthetic oligonucleotide
  source 1..19: mol_type = other RNA
ctgccagagtccctgctac

SEQ ID NO: 226 - RNA, 19 nt, synthetic construct
  misc_feature 1..19: note = Description of Artificial Sequence: Synthetic oligonucleotide
  source 1..19: mol_type = other RNA
tgccagagtccctgctacc

SEQ ID NO: 227 - RNA, 19 nt, synthetic construct
  misc_feature 1..19: note = Description of Artificial Sequence: Synthetic oligonucleotide
  source 1..19: mol_type = other RNA
gccagagtccctgctacct

SEQ ID NO: 228 - RNA, 19 nt, synthetic construct
  misc_feature 1..19: note = Description of Artificial Sequence: Synthetic oligonucleotide
  source 1..19: mol_type = other RNA
ccagagtccctgctacctg

SEQ ID NO: 229 - RNA, 19 nt, synthetic construct
  misc_feature 1..19: note = Description of Artificial Sequence: Synthetic oligonucleotide
  source 1..19: mol_type = other RNA
cagagtccctgctacctgt

SEQ ID NO: 230 - RNA, 19 nt, synthetic construct
  misc_feature 1..19: note = Description of Artificial Sequence: Synthetic oligonucleotide
  source 1..19: mol_type = other RNA
agagtccctgctacctgtt

SEQ ID NO: 231 - RNA, 19 nt, synthetic construct
  misc_feature 1..19: note = Description of Artificial Sequence: Synthetic oligonucleotide
  source 1..19: mol_type = other RNA
gagtccctgctacctgtta

SEQ ID NO: 232 - RNA, 19 nt, synthetic construct
  misc_feature 1..19: note = Description of Artificial Sequence: Synthetic oligonucleotide
  source 1..19: mol_type = other RNA
agtccctgctacctgttac

SEQ ID NO: 233 - RNA, 19 nt, synthetic construct
  misc_feature 1..19: note = Description of Artificial Sequence: Synthetic oligonucleotide
  source 1..19: mol_type = other RNA
gtccctgctacctgttacc

SEQ ID NO: 234 - RNA, 19 nt, synthetic construct
  misc_feature 1..19: note = Description of Artificial Sequence: Synthetic oligonucleotide
  source 1..19: mol_type = other RNA
tccctgctacctgttacct

SEQ ID NO: 235 - RNA, 19 nt, synthetic construct
  misc_feature 1..19: note = Description of Artificial Sequence: Synthetic oligonucleotide
  source 1..19: mol_type = other RNA
ccctgctacctgttacctc

SEQ ID NO: 236 - RNA, 19 nt, synthetic construct
  misc_feature 1..19: note = Description of Artificial Sequence: Synthetic oligonucleotide
  source 1..19: mol_type = other RNA
cctgctacctgttacctcc

SEQ ID NO: 237 - RNA, 19 nt, synthetic construct
  misc_feature 1..19: note = Description of Artificial Sequence: Synthetic oligonucleotide
  source 1..19: mol_type = other RNA
ctgctacctgttacctcca

SEQ ID NO: 238 - RNA, 19 nt, synthetic construct
  misc_feature 1..19: note = Description of Artificial Sequence: Synthetic oligonucleotide
  source 1..19: mol_type = other RNA
tgctacctgttacctccac

SEQ ID NO: 239 - RNA, 19 nt, synthetic construct
  misc_feature 1..19: note = Description of Artificial Sequence: Synthetic oligonucleotide
  source 1..19: mol_type = other RNA
gctacctgttacctccacc

SEQ ID NO: 240 - RNA, 19 nt, synthetic construct
  misc_feature 1..19: note = Description of Artificial Sequence: Synthetic oligonucleotide
  source 1..19: mol_type = other RNA
ctacctgttacctccaccc

SEQ ID NO: 241 - RNA, 19 nt, synthetic construct
  misc_feature 1..19: note = Description of Artificial Sequence: Synthetic oligonucleotide
  source 1..19: mol_type = other RNA
tacctgttacctccacccc

SEQ ID NO: 242 - RNA, 19 nt, synthetic construct
  misc_feature 1..19: note = Description of Artificial Sequence: Synthetic oligonucleotide
  source 1..19: mol_type = other RNA
acctgttacctccacccct

SEQ ID NO: 243 - RNA, 19 nt, synthetic construct
  misc_feature 1..19: note = Description of Artificial Sequence: Synthetic oligonucleotide
  source 1..19: mol_type = other RNA
cctgttacctccaccccta

SEQ ID NO: 244 - RNA, 19 nt, synthetic construct
  misc_feature 1..19: note = Description of Artificial Sequence: Synthetic oligonucleotide
  source 1..19: mol_type = other RNA
ctgttacctccacccctat

SEQ ID NO: 245 - RNA, 19 nt, synthetic construct
  misc_feature 1..19: note = Description of Artificial Sequence: Synthetic oligonucleotide
  source 1..19: mol_type = other RNA
tgttacctccacccctatt

SEQ ID NO: 246 - RNA, 19 nt, synthetic construct
  misc_feature 1..19: note = Description of Artificial Sequence: Synthetic oligonucleotide
  source 1..19: mol_type = other RNA
gttacctccacccctattt

SEQ ID NO: 247 - RNA, 19 nt, synthetic construct
  misc_feature 1..19: note = Description of Artificial Sequence: Synthetic oligonucleotide
  source 1..19: mol_type = other RNA
ttacctccacccctattta

SEQ ID NO: 248 - RNA, 19 nt, synthetic construct
  misc_feature 1..19: note = Description of Artificial Sequence: Synthetic oligonucleotide
  source 1..19: mol_type = other RNA
tacctccacccctatttag

SEQ ID NO: 249 - RNA, 19 nt, synthetic construct
  misc_feature 1..19: note = Description of Artificial Sequence: Synthetic oligonucleotide
  source 1..19: mol_type = other RNA
acctccacccctatttagt

SEQ ID NO: 250 - RNA, 19 nt, synthetic construct
  misc_feature 1..19: note = Description of Artificial Sequence: Synthetic oligonucleotide
  source 1..19: mol_type = other RNA
cctccacccctatttagtc

SEQ ID NO: 251 - RNA, 19 nt, synthetic construct
  misc_feature 1..19: note = Description of Artificial Sequence: Synthetic oligonucleotide
  source 1..19: mol_type = other RNA
ctccacccctatttagtcc

SEQ ID NO: 252 - RNA, 19 nt, synthetic construct
  misc_feature 1..19: note = Description of Artificial Sequence: Synthetic oligonucleotide
  source 1..19: mol_type = other RNA
tccacccctatttagtcct

SEQ ID NO: 253 - RNA, 19 nt, synthetic construct
  misc_feature 1..19: note = Description of Artificial Sequence: Synthetic oligonucleotide
  source 1..19: mol_type = other RNA
ccacccctatttagtccta

SEQ ID NO: 254 - RNA, 19 nt, synthetic construct
  misc_feature 1..19: note = Description of Artificial Sequence: Synthetic oligonucleotide
  source 1..19: mol_type = other RNA
cacccctatttagtcctag

SEQ ID NO: 255 - RNA, 19 nt, synthetic construct
  misc_feature 1..19: note = Description of Artificial Sequence: Synthetic oligonucleotide
  source 1..19: mol_type = other RNA
acccctatttagtcctagt

SEQ ID NO: 256 - RNA, 19 nt, synthetic construct
  misc_feature 1..19: note = Description of Artificial Sequence: Synthetic oligonucleotide
  source 1..19: mol_type = other RNA
cccctatttagtcctagtg

SEQ ID NO: 257 - RNA, 19 nt, synthetic construct
  misc_feature 1..19: note = Description of Artificial Sequence: Synthetic oligonucleotide
  source 1..19: mol_type = other RNA
ccctatttagtcctagtgg

SEQ ID NO: 258 - RNA, 19 nt, synthetic construct
  misc_feature 1..19: note = Description of Artificial Sequence: Synthetic oligonucleotide
  source 1..19: mol_type = other RNA
cctatttagtcctagtgga

SEQ ID NO: 259 - RNA, 19 nt, synthetic construct
  misc_feature 1..19: note = Description of Artificial Sequence: Synthetic oligonucleotide
  source 1..19: mol_type = other RNA
ctatttagtcctagtggac

SEQ ID NO: 260 - RNA, 19 nt, synthetic construct
  misc_feature 1..19: note = Description of Artificial Sequence: Synthetic oligonucleotide
  source 1..19: mol_type = other RNA
tatttagtcctagtggaca

SEQ ID NO: 261 - RNA, 19 nt, synthetic construct
  misc_feature 1..19: note = Description of Artificial Sequence: Synthetic oligonucleotide
  source 1..19: mol_type = other RNA
atttagtcctagtggacag

SEQ ID NO: 262 - RNA, 19 nt, synthetic construct
  misc_feature 1..19: note = Description of Artificial Sequence: Synthetic oligonucleotide
  source 1..19: mol_type = other RNA
tttagtcctagtggacagc

SEQ ID NO: 263 - RNA, 19 nt, synthetic construct
  misc_feature 1..19: note = Description of Artificial Sequence: Synthetic oligonucleotide
  source 1..19: mol_type = other RNA
ttagtcctagtggacagcc

SEQ ID NO: 264 - RNA, 19 nt, synthetic construct
  misc_feature 1..19: note = Description of Artificial Sequence: Synthetic oligonucleotide
  source 1..19: mol_type = other RNA
tagtcctagtggacagcct

SEQ ID NO: 265 - RNA, 19 nt, synthetic construct
  misc_feature 1..19: note = Description of Artificial Sequence: Synthetic oligonucleotide
  source 1..19: mol_type = other RNA
agtcctagtggacagcctc

SEQ ID NO: 266 - RNA, 19 nt, synthetic construct
  misc_feature 1..19: note = Description of Artificial Sequence: Synthetic oligonucleotide
  source 1..19: mol_type = other RNA
gtcctagtggacagcctcg

SEQ ID NO: 267 - RNA, 19 nt, synthetic construct
  misc_feature 1..19: note = Description of Artificial Sequence: Synthetic oligonucleotide
  source 1..19: mol_type = other RNA
tcctagtggacagcctcgc

SEQ ID NO: 268 - RNA, 19 nt, synthetic construct
  misc_feature 1..19: note = Description of Artificial Sequence: Synthetic oligonucleotide
  source 1..19: mol_type = other RNA
cctagtggacagcctcgct

SEQ ID NO: 269 - RNA, 19 nt, synthetic construct
  misc_feature 1..19: note = Description of Artificial Sequence: Synthetic oligonucleotide
  source 1..19: mol_type = other RNA
ctagtggacagcctcgctc

SEQ ID NO: 270 - RNA, 19 nt, synthetic construct
  misc_feature 1..19: note = Description of Artificial Sequence: Synthetic oligonucleotide
  source 1..19: mol_type = other RNA
tagtggacagcctcgctca

SEQ ID NO: 271 - RNA, 19 nt, synthetic construct
  misc_feature 1..19: note = Description of Artificial Sequence: Synthetic oligonucleotide
  source 1..19: mol_type = other RNA
agtggacagcctcgctcac

SEQ ID NO: 272 - RNA, 19 nt, synthetic construct
  misc_feature 1..19: note = Description of Artificial Sequence: Synthetic oligonucleotide
  source 1..19: mol_type = other RNA
gtggacagcctcgctcacc

SEQ ID NO: 273 - RNA, 19 nt, synthetic construct
  misc_feature 1..19: note = Description of Artificial Sequence: Synthetic oligonucleotide
  source 1..19: mol_type = other RNA
tggacagcctcgctcacct

SEQ ID NO: 274 - RNA, 19 nt, synthetic construct
  misc_feature 1..19: note = Description of Artificial Sequence: Synthetic oligonucleotide
  source 1..19: mol_type = other RNA
ggacagcctcgctcacctt

SEQ ID NO: 275 - RNA, 19 nt, synthetic construct
  misc_feature 1..19: note = Description of Artificial Sequence: Synthetic oligonucleotide
  source 1..19: mol_type = other RNA
gacagcctcgctcaccttc

SEQ ID NO: 276 - RNA, 19 nt, synthetic construct
  misc_feature 1..19: note = Description of Artificial Sequence: Synthetic oligonucleotide
  source 1..19: mol_type = other RNA
acagcctcgctcaccttcc

SEQ ID NO: 277 - RNA, 19 nt, synthetic construct
  misc_feature 1..19: note = Description of Artificial Sequence: Synthetic oligonucleotide
  source 1..19: mol_type = other RNA
cagcctcgctcaccttccc

SEQ ID NO: 278 - RNA, 19 nt, synthetic construct
  misc_feature 1..19: note = Description of Artificial Sequence: Synthetic oligonucleotide
  source 1..19: mol_type = other RNA
agcctcgctcaccttccct

SEQ ID NO: 279 - RNA, 19 nt, synthetic construct
  misc_feature 1..19: note = Description of Artificial Sequence: Synthetic oligonucleotide
  source 1..19: mol_type = other RNA
gcctcgctcaccttccctg

SEQ ID NO: 280 - RNA, 19 nt, synthetic construct
  misc_feature 1..19: note = Description of Artificial Sequence: Synthetic oligonucleotide
  source 1..19: mol_type = other RNA
cctcgctcaccttccctgg

SEQ ID NO: 281 - RNA, 19 nt, synthetic construct
  misc_feature 1..19: note = Description of Artificial Sequence: Synthetic oligonucleotide
  source 1..19: mol_type = other RNA
ctcgctcaccttccctggg

SEQ ID NO: 282 - RNA, 19 nt, synthetic construct
  misc_feature 1..19: note = Description of Artificial Sequence: Synthetic oligonucleotide
  source 1..19: mol_type = other RNA
tcgctcaccttccctggga

SEQ ID NO: 283 - RNA, 19 nt, synthetic construct
  misc_feature 1..19: note = Description of Artificial Sequence: Synthetic oligonucleotide
  source 1..19: mol_type = other RNA
cgctcaccttccctgggat

SEQ ID NO: 284 - RNA, 19 nt, synthetic construct
  misc_feature 1..19: note = Description of Artificial Sequence: Synthetic oligonucleotide
  source 1..19: mol_type = other RNA
gctcaccttccctgggatg

SEQ ID NO: 285 - RNA, 19 nt, synthetic construct
  misc_feature 1..19: note = Description of Artificial Sequence: Synthetic oligonucleotide
  source 1..19: mol_type = other RNA
ctcaccttccctgggatga

SEQ ID NO: 286 - RNA, 19 nt, synthetic construct
  misc_feature 1..19: note = Description of Artificial Sequence: Synthetic oligonucleotide
  source 1..19: mol_type = other RNA
tcaccttccctgggatgac

SEQ ID NO: 287 - RNA, 19 nt, synthetic construct
  misc_feature 1..19: note = Description of Artificial Sequence: Synthetic oligonucleotide
  source 1..19: mol_type = other RNA
caccttccctgggatgaca

SEQ ID NO: 288 - RNA, 19 nt, synthetic construct
  misc_feature 1..19: note = Description of Artificial Sequence: Synthetic oligonucleotide
  source 1..19: mol_type = other RNA
accttccctgggatgacac

SEQ ID NO: 289 - RNA, 19 nt, synthetic construct
  misc_feature 1..19: note = Description of Artificial Sequence: Synthetic oligonucleotide
  source 1..19: mol_type = other RNA
ccttccctgggatgacact

SEQ ID NO: 290 - RNA, 19 nt, synthetic construct
  misc_feature 1..19: note = Description of Artificial Sequence: Synthetic oligonucleotide
  source 1..19: mol_type = other RNA
cttccctgggatgacactt

SEQ ID NO: 291 - RNA, 19 nt, synthetic construct
  misc_feature 1..19: note = Description of Artificial Sequence: Synthetic oligonucleotide
  source 1..19: mol_type = other RNA
ttccctgggatgacacttc

SEQ ID NO: 292 - RNA, 19 nt, synthetic construct
  misc_feature 1..19: note = Description of Artificial Sequence: Synthetic oligonucleotide
  source 1..19: mol_type = other RNA
tccctgggatgacacttct

SEQ ID NO: 293 - RNA, 19 nt, synthetic construct
  misc_feature 1..19: note = Description of Artificial Sequence: Synthetic oligonucleotide
  source 1..19: mol_type = other RNA
ccctgggatgacacttctg

SEQ ID NO: 294 - RNA, 19 nt, synthetic construct
  misc_feature 1..19: note = Description of Artificial Sequence: Synthetic oligonucleotide
  source 1..19: mol_type = other RNA
cctgggatgacacttctgg

SEQ ID NO: 295 - RNA, 19 nt, synthetic construct
  misc_feature 1..19: note = Description of Artificial Sequence: Synthetic oligonucleotide
  source 1..19: mol_type = other RNA
ctgggatgacacttctggc

SEQ ID NO: 296 - RNA, 19 nt, synthetic construct
  misc_feature 1..19: note = Description of Artificial Sequence: Synthetic oligonucleotide
  source 1..19: mol_type = other RNA
tgggatgacacttctggcg

SEQ ID NO: 297 - RNA, 19 nt, synthetic construct
  misc_feature 1..19: note = Description of Artificial Sequence: Synthetic oligonucleotide
  source 1..19: mol_type = other RNA
gggatgacacttctggcgg

SEQ ID NO: 298 - RNA, 19 nt, synthetic construct
  misc_feature 1..19: note = Description of Artificial Sequence: Synthetic oligonucleotide
  source 1..19: mol_type = other RNA
ggatgacacttctggcggc

SEQ ID NO: 299 - RNA, 19 nt, synthetic construct
  misc_feature 1..19: note = Description of Artificial Sequence: Synthetic oligonucleotide
  source 1..19: mol_type = other RNA
gatgacacttctggcggct

SEQ ID NO: 300 - RNA, 19 nt, synthetic construct
  misc_feature 1..19: note = Description of Artificial Sequence: Synthetic oligonucleotide
  source 1..19: mol_type = other RNA
atgacacttctggcggctg

SEQ ID NO: 301 - RNA, 19 nt, synthetic construct
  misc_feature 1..19: note = Description of Artificial Sequence: Synthetic oligonucleotide
  source 1..19: mol_type = other RNA
tgacacttctggcggctga

SEQ ID NO: 302 - RNA, 19 nt, synthetic construct
  misc_feature 1..19: note = Description of Artificial Sequence: Synthetic oligonucleotide
  source 1..19: mol_type = other RNA
gacacttctggcggctgag

SEQ ID NO: 303 - RNA, 19 nt, synthetic construct
  misc_feature 1..19: note = Description of Artificial Sequence: Synthetic oligonucleotide
  source 1..19: mol_type = other RNA
acacttctggcggctgaga

SEQ ID NO: 304 - RNA, 19 nt, synthetic construct
  misc_feature 1..19: note = Description of Artificial Sequence: Synthetic oligonucleotide
  source 1..19: mol_type = other RNA
cacttctggcggctgagat

SEQ ID NO: 305 - RNA, 19 nt, synthetic construct
  misc_feature 1..19: note = Description of Artificial Sequence: Synthetic oligonucleotide
  source 1..19: mol_type = other RNA
acttctggcggctgagatg

SEQ ID NO: 306 - RNA, 19 nt, synthetic construct
  misc_feature 1..19: note = Description of Artificial Sequence: Synthetic oligonucleotide
  source 1..19: mol_type = other RNA
cttctggcggctgagatga

SEQ ID NO: 307 - RNA, 19 nt, synthetic construct
  misc_feature 1..19: note = Description of Artificial Sequence: Synthetic oligonucleotide
  source 1..19: mol_type = other RNA
ttctggcggctgagatgag

SEQ ID NO: 308 - RNA, 19 nt, synthetic construct
  misc_feature 1..19: note = Description of Artificial Sequence: Synthetic oligonucleotide
  source 1..19: mol_type = other RNA
tctggcggctgagatgagc

SEQ ID NO: 309 - RNA, 19 nt, synthetic construct
  misc_feature 1..19: note = Description of Artificial Sequence: Synthetic oligonucleotide
  source 1..19: mol_type = other RNA
ctggcggctgagatgagcg

SEQ ID NO: 310 - RNA, 19 nt, synthetic construct
  misc_feature 1..19: note = Description of Artificial Sequence: Synthetic oligonucleotide
  source 1..19: mol_type = other RNA
tggcggctgagatgagcga

SEQ ID NO: 311 - RNA, 19 nt, synthetic construct
  misc_feature 1..19: note = Description of Artificial Sequence: Synthetic oligonucleotide
  source 1..19: mol_type = other RNA
ggcggctgagatgagcgag

SEQ ID NO: 312 - RNA, 19 nt, synthetic construct
  misc_feature 1..19: note = Description of Artificial Sequence: Synthetic oligonucleotide
  source 1..19: mol_type = other RNA
gcggctgagatgagcgagc

SEQ ID NO: 313 - RNA, 19 nt, synthetic construct
  misc_feature 1..19: note = Description of Artificial Sequence: Synthetic oligonucleotide
  source 1..19: mol_type = other RNA
cggctgagatgagcgagcc

SEQ ID NO: 314 - RNA, 19 nt, synthetic construct
  misc_feature 1..19: note = Description of Artificial Sequence: Synthetic oligonucleotide
  source 1..19: mol_type = other RNA
ggctgagatgagcgagcct

SEQ ID NO: 315 - RNA, 19 nt, synthetic construct
  misc_feature 1..19: note = Description of Artificial Sequence: Synthetic oligonucleotide
  source 1..19: mol_type = other RNA
gctgagatgagcgagcctc

SEQ ID NO: 316 - RNA, 19 nt, synthetic construct
  misc_feature 1..19: note = Description of Artificial Sequence: Synthetic oligonucleotide
  source 1..19: mol_type = other RNA
ctgagatgagcgagcctct

SEQ ID NO: 317 - RNA, 19 nt, synthetic construct
  misc_feature 1..19: note = Description of Artificial Sequence: Synthetic oligonucleotide
  source 1..19: mol_type = other RNA
tgagatgagcgagcctctc

SEQ ID NO: 318 - RNA, 19 nt, synthetic construct
  misc_feature 1..19: note = Description of Artificial Sequence: Synthetic oligonucleotide
  source 1..19: mol_type = other RNA
gagatgagcgagcctctct

SEQ ID NO: 319 - RNA, 19 nt, synthetic construct
  misc_feature 1..19: note = Description of Artificial Sequence: Synthetic oligonucleotide
  source 1..19: mol_type = other RNA
agatgagcgagcctctctg

SEQ ID NO: 320 - RNA, 19 nt, synthetic construct
  misc_feature 1..19: note = Description of Artificial Sequence: Synthetic oligonucleotide
  source 1..19: mol_type = other RNA
gatgagcgagcctctctgg

SEQ ID NO: 321 - RNA, 19 nt, synthetic construct
  misc_feature 1..19: note = Description of Artificial Sequence: Synthetic oligonucleotide
  source 1..19: mol_type = other RNA
atgagcgagcctctctggg

SEQ ID NO: 322 - RNA, 19 nt, synthetic construct
  misc_feature 1..19: note = Description of Artificial Sequence: Synthetic oligonucleotide
  source 1..19: mol_type = other RNA
tgagcgagcctctctgggc

SEQ ID NO: 323 - RNA, 19 nt, synthetic construct
  misc_feature 1..19: note = Description of Artificial Sequence: Synthetic oligonucleotide
  source 1..19: mol_type = other RNA
gagcgagcctctctgggct

SEQ ID NO: 324 - RNA, 19 nt, synthetic construct
  misc_feature 1..19: note = Description of Artificial Sequence: Synthetic oligonucleotide
  source 1..19: mol_type = other RNA
agcgagcctctctgggctc

SEQ ID NO: 325 - RNA, 19 nt, synthetic construct
  misc_feature 1..19: note = Description of Artificial Sequence: Synthetic oligonucleotide
  source 1..19: mol_type = other RNA
gcgagcctctctgggctct

SEQ ID NO: 326 - RNA, 19 nt, synthetic construct
  misc_feature 1..19: note = Description of Artificial Sequence: Synthetic oligonucleotide
  source 1..19: mol_type = other RNA
cgagcctctctgggctctg

SEQ ID NO: 327 - RNA, 19 nt, synthetic construct
  misc_feature 1..19: note = Description of Artificial Sequence: Synthetic oligonucleotide
  source 1..19: mol_type = other RNA
gagcctctctgggctctgc

SEQ ID NO: 328 - RNA, 19 nt, synthetic construct
  misc_feature 1..19: note = Description of Artificial Sequence: Synthetic oligonucleotide
  source 1..19: mol_type = other RNA
agcctctctgggctctgcc

SEQ ID NO: 329 - RNA, 19 nt, synthetic construct
  misc_feature 1..19: note = Description of Artificial Sequence: Synthetic oligonucleotide
  source 1..19: mol_type = other RNA
gcctctctgggctctgccg

SEQ ID NO: 330 - RNA, 19 nt, synthetic construct
  misc_feature 1..19: note = Description of Artificial Sequence: Synthetic oligonucleotide
  source 1..19: mol_type = other RNA
cctctctgggctctgccgc

SEQ ID NO: 331 - RNA, 19 nt, synthetic construct
  misc_feature 1..19: note = Description of Artificial Sequence: Synthetic oligonucleotide
  source 1..19: mol_type = other RNA
ctctctgggctctgccgcc

SEQ ID NO: 332 - RNA, 19 nt, synthetic construct
  misc_feature 1..19: note = Description of Artificial Sequence: Synthetic oligonucleotide
  source 1..19: mol_type = other RNA
tctctgggctctgccgccg

SEQ ID NO: 333 - RNA, 19 nt, synthetic construct
  misc_feature 1..19: note = Description of Artificial Sequence: Synthetic oligonucleotide
  source 1..19: mol_type = other RNA
ctctgggctctgccgccgg

SEQ ID NO: 334 - RNA, 19 nt, synthetic construct
  misc_feature 1..19: note = Description of Artificial Sequence: Synthetic oligonucleotide
  source 1..19: mol_type = other RNA
tctgggctctgccgccggg

SEQ ID NO: 335 - RNA, 19 nt, synthetic construct
  misc_feature 1..19: note = Description of Artificial Sequence: Synthetic oligonucleotide
  source 1..19: mol_type = other RNA
ctgggctctgccgccgggt

SEQ ID NO: 336 - RNA, 19 nt, synthetic construct
  misc_feature 1..19: note = Description of Artificial Sequence: Synthetic oligonucleotide
  source 1..19: mol_type = other RNA
tgggctctgccgccgggtg

SEQ ID NO: 337 - RNA, 19 nt, synthetic construct
  misc_feature 1..19: note = Description of Artificial Sequence: Synthetic oligonucleotide
  source 1..19: mol_type = other RNA
gggctctgccgccgggtgt

SEQ ID NO: 338 - RNA, 19 nt, synthetic construct
  misc_feature 1..19: note = Description of Artificial Sequence: Synthetic oligonucleotide
  source 1..19: mol_type = other RNA
ggctctgccgccgggtgtg

SEQ ID NO: 339 - RNA, 19 nt, synthetic construct
  misc_feature 1..19: note = Description of Artificial Sequence: Synthetic oligonucleotide
  source 1..19: mol_type = other RNA
gctctgccgccgggtgtgg

SEQ ID NO: 340 - RNA, 19 nt, synthetic construct
  misc_feature 1..19: note = Description of Artificial Sequence: Synthetic oligonucleotide
  source 1..19: mol_type = other RNA
ctctgccgccgggtgtggg

SEQ ID NO: 341 - RNA, 19 nt, synthetic construct
  misc_feature 1..19: note = Description of Artificial Sequence: Synthetic oligonucleotide
  source 1..19: mol_type = other RNA
tctgccgccgggtgtgggc

SEQ ID NO: 342 - RNA, 19 nt, synthetic construct
  misc_feature 1..19: note = Description of Artificial Sequence: Synthetic oligonucleotide
  source 1..19: mol_type = other RNA
ctgccgccgggtgtgggct

SEQ ID NO: 343 - RNA, 19 nt, synthetic construct
  misc_feature 1..19: note = Description of Artificial Sequence: Synthetic oligonucleotide
  source 1..19: mol_type = other RNA
tgccgccgggtgtgggctg

SEQ ID NO: 344 - RNA, 19 nt, synthetic construct
  misc_feature 1..19: note = Description of Artificial Sequence: Synthetic oligonucleotide
  source 1..19: mol_type = other RNA
gccgccgggtgtgggctga

SEQ ID NO: 345 - RNA, 19 nt, synthetic construct
  misc_feature 1..19: note = Description of Artificial Sequence: Synthetic oligonucleotide
  source 1..19: mol_type = other RNA
ccgccgggtgtgggctgac

SEQ ID NO: 346 - RNA, 19 nt, synthetic construct
  misc_feature 1..19: note = Description of Artificial Sequence: Synthetic oligonucleotide
  source 1..19: mol_type = other RNA
cgccgggtgtgggctgacc

SEQ ID NO: 347 - RNA, 19 nt, synthetic construct
  misc_feature 1..19: note = Description of Artificial Sequence: Synthetic oligonucleotide
  source 1..19: mol_type = other RNA
gccgggtgtgggctgacct

SEQ ID NO: 348 - RNA, 19 nt, synthetic construct
  misc_feature 1..19: note = Description of Artificial Sequence: Synthetic oligonucleotide
  source 1..19: mol_type = other RNA
ccgggtgtgggctgacctg

SEQ ID NO: 349 - RNA, 19 nt, synthetic construct
  misc_feature 1..19: note = Description of Artificial Sequence: Synthetic oligonucleotide
  source 1..19: mol_type = other RNA
cgggtgtgggctgacctgc

SEQ ID NO: 350 - RNA, 19 nt, synthetic construct
  misc_feature 1..19: note = Description of Artificial Sequence: Synthetic oligonucleotide
  source 1..19: mol_type = other RNA
gggtgtgggctgacctgcc

SEQ ID NO: 351 - RNA, 19 nt, synthetic construct
  misc_feature 1..19: note = Description of Artificial Sequence: Synthetic oligonucleotide
  source 1..19: mol_type = other RNA
ggtgtgggctgacctgcct

SEQ ID NO: 352 - RNA, 19 nt, synthetic construct
  misc_feature 1..19: note = Description of Artificial Sequence: Synthetic oligonucleotide
  source 1..19: mol_type = other RNA
gtgtgggctgacctgccta

SEQ ID NO: 353 - RNA, 19 nt, synthetic construct
  misc_feature 1..19: note = Description of Artificial Sequence: Synthetic oligonucleotide
  source 1..19: mol_type = other RNA
tgtgggctgacctgcctac

SEQ ID NO: 354 - RNA, 19 nt, synthetic construct
  misc_feature 1..19: note = Description of Artificial Sequence: Synthetic oligonucleotide
  source 1..19: mol_type = other RNA
gtgggctgacctgcctaca

SEQ ID NO: 355 - RNA, 19 nt, synthetic construct
  misc_feature 1..19: note = Description of Artificial Sequence: Synthetic oligonucleotide
  source 1..19: mol_type = other RNA
tgggctgacctgcctacag

SEQ ID NO: 356 - RNA, 19 nt, synthetic construct
  misc_feature 1..19: note = Description of Artificial Sequence: Synthetic oligonucleotide
  source 1..19: mol_type = other RNA
gggctgacctgcctacagc

SEQ ID NO: 357 - RNA, 19 nt, synthetic construct
  misc_feature 1..19: note = Description of Artificial Sequence: Synthetic oligonucleotide
  source 1..19: mol_type = other RNA
ggctgacctgcctacagct

SEQ ID NO: 358 - RNA, 19 nt, synthetic construct
  misc_feature 1..19: note = Description of Artificial Sequence: Synthetic oligonucleotide
  source 1..19: mol_type = other RNA
gctgacctgcctacagctg

SEQ ID NO: 359 - RNA, 19 nt, synthetic construct
  misc_feature 1..19: note = Description of Artificial Sequence: Synthetic oligonucleotide
  source 1..19: mol_type = other RNA
ctgacctgcctacagctgg

SEQ ID NO: 360 - RNA, 19 nt, synthetic construct
  misc_feature 1..19: note = Description of Artificial Sequence: Synthetic oligonucleotide
  source 1..19: mol_type = other RNA
tgacctgcctacagctggg

SEQ ID NO: 361 - RNA, 19 nt, synthetic construct
  misc_feature 1..19: note = Description of Artificial Sequence: Synthetic oligonucleotide
  source 1..19: mol_type = other RNA
gacctgcctacagctgggg

SEQ ID NO: 362 - RNA, 19 nt, synthetic construct
  misc_feature 1..19: note = Description of Artificial Sequence: Synthetic oligonucleotide
  source 1..19: mol_type = other RNA
acctgcctacagctggggc

SEQ ID NO: 363 - RNA, 19 nt, synthetic construct
  misc_feature 1..19: note = Description of Artificial Sequence: Synthetic oligonucleotide
  source 1..19: mol_type = other RNA
cctgcctacagctggggcc

SEQ ID NO: 364 - RNA, 19 nt, synthetic construct
  misc_feature 1..19: note = Description of Artificial Sequence: Synthetic oligonucleotide
  source 1..19: mol_type = other RNA
ctgcctacagctggggcct

SEQ ID NO: 365 - RNA, 19 nt, synthetic construct
  misc_feature 1..19: note = Description of Artificial Sequence: Synthetic oligonucleotide
  source 1..19: mol_type = other RNA
tgcctacagctggggcctg

SEQ ID NO: 366 - RNA, 19 nt, synthetic construct
  misc_feature 1..19: note = Description of Artificial Sequence: Synthetic oligonucleotide
  source 1..19: mol_type = other RNA
gcctacagctggggcctga

SEQ ID NO: 367 - RNA, 19 nt, synthetic construct
  misc_feature 1..19: note = Description of Artificial Sequence: Synthetic oligonucleotide
  source 1..19: mol_type = other RNA
cctacagctggggcctgat

SEQ ID NO: 368 - RNA, 19 nt, synthetic construct
  misc_feature 1..19: note = Description of Artificial Sequence: Synthetic oligonucleotide
  source 1..19: mol_type = other RNA
ctacagctggggcctgata

SEQ ID NO: 369 - RNA, 19 nt, synthetic construct
  misc_feature 1..19: note = Description of Artificial Sequence: Synthetic oligonucleotide
  source 1..19: mol_type = other RNA
tacagctggggcctgataa

SEQ ID NO: 370 - RNA, 19 nt, synthetic construct
  misc_feature 1..19: note = Description of Artificial Sequence: Synthetic oligonucleotide
  source 1..19: mol_type = other RNA
acagctggggcctgataag

SEQ ID NO: 371 - RNA, 19 nt, synthetic construct
  misc_feature 1..19: note = Description of Artificial Sequence: Synthetic oligonucleotide
  source 1..19: mol_type = other RNA
cagctggggcctgataagg

SEQ ID NO: 372 - RNA, 19 nt, synthetic construct
  misc_feature 1..19: note = Description of Artificial Sequence: Synthetic oligonucleotide
  source 1..19: mol_type = other RNA
agctggggcctgataaggc

SEQ ID NO: 373 - RNA, 19 nt, synthetic construct
  misc_feature 1..19: note = Description of Artificial Sequence: Synthetic oligonucleotide
  source 1..19: mol_type = other RNA
gctggggcctgataaggca

SEQ ID NO: 374 - RNA, 19 nt, synthetic construct
  misc_feature 1..19: note = Description of Artificial Sequence: Synthetic oligonucleotide
  source 1..19: mol_type = other RNA
ctggggcctgataaggcag

SEQ ID NO: 375 - RNA, 19 nt, synthetic construct
  misc_feature 1..19: note = Description of Artificial Sequence: Synthetic oligonucleotide
  source 1..19: mol_type = other RNA
tggggcctgataaggcagc

SEQ ID NO: 376 - RNA, 19 nt, synthetic construct
  misc_feature 1..19: note = Description of Artificial Sequence: Synthetic oligonucleotide
  source 1..19: mol_type = other RNA
ggggcctgataaggcagca

SEQ ID NO: 377 - RNA, 19 nt, synthetic construct
  misc_feature 1..19: note = Description of Artificial Sequence: Synthetic oligonucleotide
  source 1..19: mol_type = other RNA
gggcctgataaggcagcag

SEQ ID NO: 378 - RNA, 19 nt, synthetic construct
  misc_feature 1..19: note = Description of Artificial Sequence: Synthetic oligonucleotide
  source 1..19: mol_type = other RNA
ggcctgataaggcagcagc

SEQ ID NO: 379 - RNA, 19 nt, synthetic construct
  misc_feature 1..19: note = Description of Artificial Sequence: Synthetic oligonucleotide
  source 1..19: mol_type = other RNA
gcctgataaggcagcagca

SEQ ID NO: 380 - RNA, 19 nt, synthetic construct
  misc_feature 1..19: note = Description of Artificial Sequence: Synthetic oligonucleotide
  source 1..19: mol_type = other RNA
cctgataaggcagcagcaa

SEQ ID NO: 381 - RNA, 19 nt, synthetic construct
  misc_feature 1..19: note = Description of Artificial Sequence: Synthetic oligonucleotide
  source 1..19: mol_type = other RNA
ctgataaggcagcagcaaa

SEQ ID NO: 382 - RNA, 19 nt, synthetic construct
  misc_feature 1..19: note = Description of Artificial Sequence: Synthetic oligonucleotide
  source 1..19: mol_type = other RNA
tgataaggcagcagcaaaa

SEQ ID NO: 383 - RNA, 19 nt, synthetic construct
  misc_feature 1..19: note = Description of Artificial Sequence: Synthetic oligonucleotide
  source 1..19: mol_type = other RNA
gataaggcagcagcaaaag

SEQ ID NO: 384 - RNA, 19 nt, synthetic construct
  misc_feature 1..19: note = Description of Artificial Sequence: Synthetic oligonucleotide
  source 1..19: mol_type = other RNA
ataaggcagcagcaaaagg

SEQ ID NO: 385 - RNA, 19 nt, synthetic construct
  misc_feature 1..19: note = Description of Artificial Sequence: Synthetic oligonucleotide
  source 1..19: mol_type = other RNA
taaggcagcagcaaaaggg

SEQ ID NO: 386 - RNA, 19 nt, synthetic construct
  misc_feature 1..19: note = Description of Artificial Sequence: Synthetic oligonucleotide
  source 1..19: mol_type = other RNA
aaggcagcagcaaaagggt

SEQ ID NO: 387 - RNA, 19 nt, synthetic construct
  misc_feature 1..19: note = Description of Artificial Sequence: Synthetic oligonucleotide
  source 1..19: mol_type = other RNA
aggcagcagcaaaagggtg

SEQ ID NO: 388 - RNA, 19 nt, synthetic construct
  misc_feature 1..19: note = Description of Artificial Sequence: Synthetic oligonucleotide
  source 1..19: mol_type = other RNA
ggcagcagcaaaagggtgg

SEQ ID NO: 389 - RNA, 19 nt, synthetic construct
  misc_feature 1..19: note = Description of Artificial Sequence: Synthetic oligonucleotide
  source 1..19: mol_type = other RNA
gcagcagcaaaagggtgga

SEQ ID NO: 390 - RNA, 19 nt, synthetic construct
  misc_feature 1..19: note = Description of Artificial Sequence: Synthetic oligonucleotide
  source 1..19: mol_type = other RNA
cagcagcaaaagggtggag

SEQ ID NO: 391 - RNA, 19 nt, synthetic construct
  misc_feature 1..19: note = Description of Artificial Sequence: Synthetic oligonucleotide
  source 1..19: mol_type = other RNA
agcagcaaaagggtggagg

SEQ ID NO: 392 - RNA, 19 nt, synthetic construct
  misc_feature 1..19: note = Description of Artificial Sequence: Synthetic oligonucleotide
  source 1..19: mol_type = other RNA
gcagcaaaagggtggaggg

SEQ ID NO: 393 - RNA, 19 nt, synthetic construct
  misc_feature 1..19: note = Description of Artificial Sequence: Synthetic oligonucleotide
  source 1..19: mol_type = other RNA
cagcaaaagggtggagggg

SEQ ID NO: 394 - RNA, 19 nt, synthetic construct
  misc_feature 1..19: note = Description of Artificial Sequence: Synthetic oligonucleotide
  source 1..19: mol_type = other RNA
agcaaaagggtggagggga

SEQ ID NO: 395 - RNA, 19 nt, synthetic construct
  misc_feature 1..19: note = Description of Artificial Sequence: Synthetic oligonucleotide
  source 1..19: mol_type = other RNA
gcaaaagggtggaggggag

SEQ ID NO: 396 - RNA, 19 nt, synthetic construct
  misc_feature 1..19: note = Description of Artificial Sequence: Synthetic oligonucleotide
  source 1..19: mol_type = other RNA
caaaagggtggaggggagg

SEQ ID NO: 397 - RNA, 19 nt, synthetic construct
  misc_feature 1..19: note = Description of Artificial Sequence: Synthetic oligonucleotide
  source 1..19: mol_type = other RNA
aaaagggtggaggggaggc

SEQ ID NO: 398 - RNA, 19 nt, synthetic construct
  misc_feature 1..19: note = Description of Artificial Sequence: Synthetic oligonucleotide
  source 1..19: mol_type = other RNA
aaagggtggaggggaggca

SEQ ID NO: 399 - RNA, 19 nt, synthetic construct
  misc_feature 1..19: note = Description of Artificial Sequence: Synthetic oligonucleotide
  source 1..19: mol_type = other RNA
aagggtggaggggaggcag

SEQ ID NO: 400 - RNA, 19 nt, synthetic construct
  misc_feature 1..19: note = Description of Artificial Sequence: Synthetic oligonucleotide
  source 1..19: mol_type = other RNA
agggtggaggggaggcagt

SEQ ID NO: 401 - RNA, 19 nt, synthetic construct
  misc_feature 1..19: note = Description of Artificial Sequence: Synthetic oligonucleotide
  source 1..19: mol_type = other RNA
gggtggaggggaggcagtg

SEQ ID NO: 402 - RNA, 19 nt, synthetic construct
  misc_feature 1..19: note = Description of Artificial Sequence: Synthetic oligonucleotide
  source 1..19: mol_type = other RNA
ggtggaggggaggcagtgt

SEQ ID NO: 403 - RNA, 19 nt, synthetic construct
  misc_feature 1..19: note = Description of Artificial Sequence: Synthetic oligonucleotide
  source 1..19: mol_type = other RNA
gtggaggggaggcagtgtt

SEQ ID NO: 404 - RNA, 19 nt, synthetic construct
  misc_feature 1..19: note = Description of Artificial Sequence: Synthetic oligonucleotide
  source 1..19: mol_type = other RNA
tggaggggaggcagtgttg

SEQ ID NO: 405 - RNA, 19 nt, synthetic construct
  misc_feature 1..19: note = Description of Artificial Sequence: Synthetic oligonucleotide
  source 1..19: mol_type = other RNA
ggaggggaggcagtgttga

SEQ ID NO: 406 - RNA, 19 nt, synthetic construct
  misc_feature 1..19: note = Description of Artificial Sequence: Synthetic oligonucleotide
  source 1..19: mol_type = other RNA
gaggggaggcagtgttgaa

SEQ ID NO: 407 - RNA, 19 nt, synthetic construct
  misc_feature 1..19: note = Description of Artificial Sequence: Synthetic oligonucleotide
  source 1..19: mol_type = other RNA
aggggaggcagtgttgaag

SEQ ID NO: 408 - RNA, 19 nt, synthetic construct
  misc_feature 1..19: note = Description of Artificial Sequence: Synthetic oligonucleotide
  source 1..19: mol_type = other RNA
ggggaggcagtgttgaagc

SEQ ID NO: 409 - RNA, 19 nt, synthetic construct
  misc_feature 1..19: note = Description of Artificial Sequence: Synthetic oligonucleotide
  source 1..19: mol_type = other RNA
gggaggcagtgttgaagct

SEQ ID NO: 410 - RNA, 19 nt, synthetic construct
  misc_feature 1..19: note = Description of Artificial Sequence: Synthetic oligonucleotide
  source 1..19: mol_type = other RNA
ggaggcagtgttgaagctg

SEQ ID NO: 411 - RNA, 19 nt, synthetic construct
  misc_feature 1..19: note = Description of Artificial Sequence: Synthetic oligonucleotide
  source 1..19: mol_type = other RNA
gaggcagtgttgaagctgg

SEQ ID NO: 412 - RNA, 19 nt, synthetic construct
  misc_feature 1..19: note = Description of Artificial Sequence: Synthetic oligonucleotide
  source 1..19: mol_type = other RNA
aggcagtgttgaagctggg

SEQ ID NO: 413 - RNA, 19 nt, synthetic construct
  misc_feature 1..19: note = Description of Artificial Sequence: Synthetic oligonucleotide
  source 1..19: mol_type = other RNA
ggcagtgttgaagctgggg

SEQ ID NO: 414 - RNA, 19 nt, synthetic construct
  misc_feature 1..19: note = Description of Artificial Sequence: Synthetic oligonucleotide
  source 1..19: mol_type = other RNA
gcagtgttgaagctggggc

SEQ ID NO: 415 - RNA, 19 nt, synthetic construct
  misc_feature 1..19: note = Description of Artificial Sequence: Synthetic oligonucleotide
  source 1..19: mol_type = other RNA
cagtgttgaagctggggca

SEQ ID NO: 416 - RNA, 19 nt, synthetic construct
  misc_feature 1..19: note = Description of Artificial Sequence: Synthetic oligonucleotide
  source 1..19: mol_type = other RNA
agtgttgaagctggggcaa

SEQ ID NO: 417 - RNA, 19 nt, synthetic construct
  misc_feature 1..19: note = Description of Artificial Sequence: Synthetic oligonucleotide
  source 1..19: mol_type = other RNA
gtgttgaagctggggcaag

SEQ ID NO: 418 - RNA, 19 nt, synthetic construct
  misc_feature 1..19: note = Description of Artificial Sequence: Synthetic oligonucleotide
  source 1..19: mol_type = other RNA
tgttgaagctggggcaagt

SEQ ID NO: 419 - RNA, 19 nt, synthetic construct
  misc_feature 1..19: note = Description of Artificial Sequence: Synthetic oligonucleotide
  source 1..19: mol_type = other RNA
gttgaagctggggcaagta

SEQ ID NO: 420 - RNA, 19 nt, synthetic construct
  misc_feature 1..19: note = Description of Artificial Sequence: Synthetic oligonucleotide
  source 1..19: mol_type = other RNA
ttgaagctggggcaagtaa

SEQ ID NO: 421 - RNA, 19 nt, synthetic construct
  misc_feature 1..19: note = Description of Artificial Sequence: Synthetic oligonucleotide
  source 1..19: mol_type = other RNA
tgaagctggggcaagtaat

SEQ ID NO: 422 - RNA, 19 nt, synthetic construct
  misc_feature 1..19: note = Description of Artificial Sequence: Synthetic oligonucleotide
  source 1..19: mol_type = other RNA
gaagctggggcaagtaatt

SEQ ID NO: 423 - RNA, 19 nt, synthetic construct
  misc_feature 1..19: note = Description of Artificial Sequence: Synthetic oligonucleotide
  source 1..19: mol_type = other RNA
aagctggggcaagtaattt

SEQ ID NO: 424 - RNA, 19 nt, synthetic construct
  misc_feature 1..19: note = Description of Artificial Sequence: Synthetic oligonucleotide
  source 1..19: mol_type = other RNA
agctggggcaagtaatttt

SEQ ID NO: 425 - RNA, 19 nt, synthetic construct
  misc_feature 1..19: note = Description of Artificial Sequence: Synthetic oligonucleotide
  source 1..19: mol_type = other RNA
gctggggcaagtaattttc

SEQ ID NO: 426 - RNA, 19 nt, synthetic construct
  misc_feature 1..19: note = Description of Artificial Sequence: Synthetic oligonucleotide
  source 1..19: mol_type = other RNA
ctggggcaagtaattttcc

SEQ ID NO: 427 - RNA, 19 nt, synthetic construct
  misc_feature 1..19: note = Description of Artificial Sequence: Synthetic oligonucleotide
  source 1..19: mol_type = other RNA
tggggcaagtaattttccc

SEQ ID NO: 428 - RNA, 19 nt, synthetic construct
  misc_feature 1..19: note = Description of Artificial Sequence: Synthetic oligonucleotide
  source 1..19: mol_type = other RNA
ggggcaagtaattttcccc

SEQ ID NO: 429 - RNA, 19 nt, synthetic construct
  misc_feature 1..19: note = Description of Artificial Sequence: Synthetic oligonucleotide
  source 1..19: mol_type = other RNA
gggcaagtaattttcccca

SEQ ID NO: 430 - RNA, 19 nt, synthetic construct
  misc_feature 1..19: note = Description of Artificial Sequence: Synthetic oligonucleotide
  source 1..19: mol_type = other RNA
ggcaagtaattttccccaa

SEQ ID NO: 431 - RNA, 19 nt, synthetic construct
  misc_feature 1..19: note = Description of Artificial Sequence: Synthetic oligonucleotide
  source 1..19: mol_type = other RNA
gcaagtaattttccccaat

SEQ ID NO: 432 - RNA, 19 nt, synthetic construct
  misc_feature 1..19: note = Description of Artificial Sequence: Synthetic oligonucleotide
  source 1..19: mol_type = other RNA
caagtaattttccccaatt

SEQ ID NO: 433 - RNA, 19 nt, synthetic construct
  misc_feature 1..19: note = Description of Artificial Sequence: Synthetic oligonucleotide
  source 1..19: mol_type = other RNA
aagtaattttccccaattt

SEQ ID NO: 434 - RNA, 19 nt, synthetic construct
  misc_feature 1..19: note = Description of Artificial Sequence: Synthetic oligonucleotide
  source 1..19: mol_type = other RNA
agtaattttccccaattta

SEQ ID NO: 435 - RNA, 19 nt, synthetic construct
  misc_feature 1..19: note = Description of Artificial Sequence: Synthetic oligonucleotide
  source 1..19: mol_type = other RNA
gtaattttccccaatttac

SEQ ID NO: 436 - RNA, 19 nt, synthetic construct
  misc_feature 1..19: note = Description of Artificial Sequence: Synthetic oligonucleotide
  source 1..19: mol_type = other RNA
taattttccccaatttaca

SEQ ID NO: 437 - RNA, 19 nt, synthetic construct
  misc_feature 1..19: note = Description of Artificial Sequence: Synthetic oligonucleotide
  source 1..19: mol_type = other RNA
aattttccccaatttacag

SEQ ID NO: 438 - RNA, 19 nt, synthetic construct
  misc_feature 1..19: note = Description of Artificial Sequence: Synthetic oligonucleotide
  source 1..19: mol_type = other RNA
attttccccaatttacagg

SEQ ID NO: 439 - RNA, 19 nt, synthetic construct
  misc_feature 1..19: note = Description of Artificial Sequence: Synthetic oligonucleotide
  source 1..19: mol_type = other RNA
ttttccccaatttacaggg

SEQ ID NO: 440 - RNA, 19 nt, synthetic construct
  misc_feature 1..19: note = Description of Artificial Sequence: Synthetic oligonucleotide
  source 1..19: mol_type = other RNA
tttccccaatttacaggga

SEQ ID NO: 441 - RNA, 19 nt, synthetic construct
  misc_feature 1..19: note = Description of Artificial Sequence: Synthetic oligonucleotide
  source 1..19: mol_type = other RNA
ttccccaatttacagggaa

SEQ ID NO: 442 - RNA, 19 nt, synthetic construct
  misc_feature 1..19: note = Description of Artificial Sequence: Synthetic oligonucleotide
  source 1..19: mol_type = other RNA
tccccaatttacagggaaa

SEQ ID NO: 443 - RNA, 19 nt, synthetic construct
  misc_feature 1..19: note = Description of Artificial Sequence: Synthetic oligonucleotide
  source 1..19: mol_type = other RNA
ccccaatttacagggaaaa

SEQ ID NO: 444 - RNA, 19 nt, synthetic construct
  misc_feature 1..19: note = Description of Artificial Sequence: Synthetic oligonucleotide
  source 1..19: mol_type = other RNA
cccaatttacagggaaaaa

SEQ ID NO: 445 - RNA, 19 nt, synthetic construct
  misc_feature 1..19: note = Description of Artificial Sequence: Synthetic oligonucleotide
  source 1..19: mol_type = other RNA
ccaatttacagggaaaaac

SEQ ID NO: 446 - RNA, 19 nt, synthetic construct
  misc_feature 1..19: note = Description of Artificial Sequence: Synthetic oligonucleotide
  source 1..19: mol_type = other RNA
caatttacagggaaaaacc

SEQ ID NO: 447 - RNA, 19 nt, synthetic construct
  misc_feature 1..19: note = Description of Artificial Sequence: Synthetic oligonucleotide
  source 1..19: mol_type = other RNA
aatttacagggaaaaaccg

SEQ ID NO: 448 - RNA, 19 nt, synthetic construct
  misc_feature 1..19: note = Description of Artificial Sequence: Synthetic oligonucleotide
  source 1..19: mol_type = other RNA
atttacagggaaaaaccga

SEQ ID NO: 449 - RNA, 19 nt, synthetic construct
  misc_feature 1..19: note = Description of Artificial Sequence: Synthetic oligonucleotide
  source 1..19: mol_type = other RNA
tttacagggaaaaaccgaa

SEQ ID NO: 450 - RNA, 19 nt, synthetic construct
  misc_feature 1..19: note = Description of Artificial Sequence: Synthetic oligonucleotide
  source 1..19: mol_type = other RNA
ttacagggaaaaaccgaaa

SEQ ID NO: 451 - RNA, 19 nt, synthetic construct
  misc_feature 1..19: note = Description of Artificial Sequence: Synthetic oligonucleotide
  source 1..19: mol_type = other RNA
tacagggaaaaaccgaaat

SEQ ID NO: 452 - RNA, 19 nt, synthetic construct
  misc_feature 1..19: note = Description of Artificial Sequence: Synthetic oligonucleotide
  source 1..19: mol_type = other RNA
acagggaaaaaccgaaatt

SEQ ID NO: 453 - RNA, 19 nt, synthetic construct
  misc_feature 1..19: note = Description of Artificial Sequence: Synthetic oligonucleotide
  source 1..19: mol_type = other RNA
cagggaaaaaccgaaattc

SEQ ID NO: 454 - RNA, 19 nt, synthetic construct
  misc_feature 1..19: note = Description of Artificial Sequence: Synthetic oligonucleotide
  source 1..19: mol_type = other RNA
agggaaaaaccgaaattca

SEQ ID NO: 455 - RNA, 19 nt, synthetic construct
  misc_feature 1..19: note = Description of Artificial Sequence: Synthetic oligonucleotide
  source 1..19: mol_type = other RNA
gggaaaaaccgaaattcag

SEQ ID NO: 456 - RNA, 19 nt, synthetic construct
  misc_feature 1..19: note = Description of Artificial Sequence: Synthetic oligonucleotide
  source 1..19: mol_type = other RNA
ggaaaaaccgaaattcaga

SEQ ID NO: 457 - RNA, 19 nt, synthetic construct
  misc_feature 1..19: note = Description of Artificial Sequence: Synthetic oligonucleotide
  source 1..19: mol_type = other RNA
gaaaaaccgaaattcagaa

SEQ ID NO: 458 - RNA, 19 nt, synthetic construct
  misc_feature 1..19: note = Description of Artificial Sequence: Synthetic oligonucleotide
  source 1..19: mol_type = other RNA
aaaaaccgaaattcagaaa

SEQ ID NO: 459 - RNA, 19 nt, synthetic construct
  misc_feature 1..19: note = Description of Artificial Sequence: Synthetic oligonucleotide
  source 1..19: mol_type = other RNA
aaaaccgaaattcagaaaa

SEQ ID NO: 460 - RNA, 19 nt, synthetic construct
  misc_feature 1..19: note = Description of Artificial Sequence: Synthetic oligonucleotide
  source 1..19: mol_type = other RNA
aaaccgaaattcagaaaag

SEQ ID NO: 461 - RNA, 19 nt, synthetic construct
  misc_feature 1..19: note = Description of Artificial Sequence: Synthetic oligonucleotide
  source 1..19: mol_type = other RNA
aaccgaaattcagaaaagt

SEQ ID NO: 462 - RNA, 19 nt, synthetic construct
  misc_feature 1..19: note = Description of Artificial Sequence: Synthetic oligonucleotide
  source 1..19: mol_type = other RNA
accgaaattcagaaaagtt

SEQ ID NO: 463 - RNA, 19 nt, synthetic construct
  misc_feature 1..19: note = Description of Artificial Sequence: Synthetic oligonucleotide
  source 1..19: mol_type = other RNA
ccgaaattcagaaaagttt

SEQ ID NO: 464 - RNA, 19 nt, synthetic construct
  misc_feature 1..19: note = Description of Artificial Sequence: Synthetic oligonucleotide
  source 1..19: mol_type = other RNA
cgaaattcagaaaagttta

SEQ ID NO: 465 - RNA, 19 nt, synthetic construct
  misc_feature 1..19: note = Description of Artificial Sequence: Synthetic oligonucleotide
  source 1..19: mol_type = other RNA
gaaattcagaaaagtttaa

SEQ ID NO: 466 - RNA, 19 nt, synthetic construct
  misc_feature 1..19: note = Description of Artificial Sequence: Synthetic oligonucleotide
  source 1..19: mol_type = other RNA
aaattcagaaaagtttaat

SEQ ID NO: 467 - RNA, 19 nt, synthetic construct
  misc_feature 1..19: note = Description of Artificial Sequence: Synthetic oligonucleotide
  source 1..19: mol_type = other RNA
aattcagaaaagtttaatg

SEQ ID NO: 468 - RNA, 19 nt, synthetic construct
  misc_feature 1..19: note = Description of Artificial Sequence: Synthetic oligonucleotide
  source 1..19: mol_type = other RNA
attcagaaaagtttaatgt

SEQ ID NO: 469 - RNA, 19 nt, synthetic construct
  misc_feature 1..19: note = Description of Artificial Sequence: Synthetic oligonucleotide
  source 1..19: mol_type = other RNA
ttcagaaaagtttaatgtc

SEQ ID NO: 470 - RNA, 19 nt, synthetic construct
  misc_feature 1..19: note = Description of Artificial Sequence: Synthetic oligonucleotide
  source 1..19: mol_type = other RNA
tcagaaaagtttaatgtca

SEQ ID NO: 471 - RNA, 19 nt, synthetic construct
  misc_feature 1..19: note = Description of Artificial Sequence: Synthetic oligonucleotide
  source 1..19: mol_type = other RNA
cagaaaagtttaatgtcac

SEQ ID NO: 472 - RNA, 19 nt, synthetic construct
  misc_feature 1..19: note = Description of Artificial Sequence: Synthetic oligonucleotide
  source 1..19: mol_type = other RNA
agaaaagtttaatgtcacc

SEQ ID NO: 473 - RNA, 19 nt, synthetic construct
  misc_feature 1..19: note = Description of Artificial Sequence: Synthetic oligonucleotide
  source 1..19: mol_type = other RNA
gaaaagtttaatgtcaccc

SEQ ID NO: 474 - RNA, 19 nt, synthetic construct
  misc_feature 1..19: note = Description of Artificial Sequence: Synthetic oligonucleotide
  source 1..19: mol_type = other RNA
aaaagtttaatgtcaccca

SEQ ID NO: 475 - RNA, 19 nt, synthetic construct
  misc_feature 1..19: note = Description of Artificial Sequence: Synthetic oligonucleotide
  source 1..19: mol_type = other RNA
aaagtttaatgtcacccag

SEQ ID NO: 476 - RNA, 19 nt, synthetic construct
  misc_feature 1..19: note = Description of Artificial Sequence: Synthetic oligonucleotide
  source 1..19: mol_type = other RNA
aagtttaatgtcacccagg

SEQ ID NO: 477 - RNA, 19 nt, synthetic construct
  misc_feature 1..19: note = Description of Artificial Sequence: Synthetic oligonucleotide
  source 1..19: mol_type = other RNA
agtttaatgtcacccaggg

SEQ ID NO: 478 - RNA, 19 nt, synthetic construct
  misc_feature 1..19: note = Description of Artificial Sequence: Synthetic oligonucleotide
  source 1..19: mol_type = other RNA
gtttaatgtcacccagggg

SEQ ID NO: 479 - RNA, 19 nt, synthetic construct
  misc_feature 1..19: note = Description of Artificial Sequence: Synthetic oligonucleotide
  source 1..19: mol_type = other RNA
tttaatgtcacccaggggc

SEQ ID NO: 480 - RNA, 19 nt, synthetic construct
  misc_feature 1..19: note = Description of Artificial Sequence: Synthetic oligonucleotide
  source 1..19: mol_type = other RNA
ttaatgtcacccaggggct

SEQ ID NO: 481 - RNA, 19 nt, synthetic construct
  misc_feature 1..19: note = Description of Artificial Sequence: Synthetic oligonucleotide
  source 1..19: mol_type = other RNA
taatgtcacccaggggctg

SEQ ID NO: 482 - RNA, 19 nt, synthetic construct
  misc_feature 1..19: note = Description of Artificial Sequence: Synthetic oligonucleotide
  source 1..19: mol_type = other RNA
aatgtcacccaggggctgg

SEQ ID NO: 483 - RNA, 19 nt, synthetic construct
  misc_feature 1..19: note = Description of Artificial Sequence: Synthetic oligonucleotide
  source 1..19: mol_type = other RNA
atgtcacccaggggctgga

SEQ ID NO: 484 - RNA, 19 nt, synthetic construct
  misc_feature 1..19: note = Description of Artificial Sequence: Synthetic oligonucleotide
  source 1..19: mol_type = other RNA
tgtcacccaggggctggag

SEQ ID NO: 485 - RNA, 19 nt, synthetic construct
  misc_feature 1..19: note = Description of Artificial Sequence: Synthetic oligonucleotide
  source 1..19: mol_type = other RNA
gtcacccaggggctggagc

SEQ ID NO: 486 - RNA, 19 nt, synthetic construct
  misc_feature 1..19: note = Description of Artificial Sequence: Synthetic oligonucleotide
  source 1..19: mol_type = other RNA
tcacccaggggctggagcc

SEQ ID NO: 487 - RNA, 19 nt, synthetic construct
  misc_feature 1..19: note = Description of Artificial Sequence: Synthetic oligonucleotide
  source 1..19: mol_type = other RNA
cacccaggggctggagccc

SEQ ID NO: 488 - RNA, 19 nt, synthetic construct
  misc_feature 1..19: note = Description of Artificial Sequence: Synthetic oligonucleotide
  source 1..19: mol_type = other RNA
acccaggggctggagccca

SEQ ID NO: 489 - RNA, 19 nt, synthetic construct
  misc_feature 1..19: note = Description of Artificial Sequence: Synthetic oligonucleotide
  source 1..19: mol_type = other RNA
cccaggggctggagcccag

SEQ ID NO: 490 - RNA, 19 nt, synthetic construct
  misc_feature 1..19: note = Description of Artificial Sequence: Synthetic oligonucleotide
  source 1..19: mol_type = other RNA
ccaggggctggagcccaga

SEQ ID NO: 491 - RNA, 19 nt, synthetic construct
  misc_feature 1..19: note = Description of Artificial Sequence: Synthetic oligonucleotide
  source 1..19: mol_type = other RNA
caggggctggagcccagac

SEQ ID NO: 492 - RNA, 19 nt, synthetic construct
  misc_feature 1..19: note = Description of Artificial Sequence: Synthetic oligonucleotide
  source 1..19: mol_type = other RNA
aggggctggagcccagacc

SEQ ID NO: 493 - RNA, 19 nt, synthetic construct
  misc_feature 1..19: note = Description of Artificial Sequence: Synthetic oligonucleotide
  source 1..19: mol_type = other RNA
ggggctggagcccagacct

SEQ ID NO: 494 - RNA, 19 nt, synthetic construct
  misc_feature 1..19: note = Description of Artificial Sequence: Synthetic oligonucleotide
  source 1..19: mol_type = other RNA
gggctggagcccagacctc

SEQ ID NO: 495 - RNA, 19 nt, synthetic construct
  misc_feature 1..19: note = Description of Artificial Sequence: Synthetic oligonucleotide
  source 1..19: mol_type = other RNA
ggctggagcccagacctct

SEQ ID NO: 496 - RNA, 19 nt, synthetic construct
  misc_feature 1..19: note = Description of Artificial Sequence: Synthetic oligonucleotide
  source 1..19: mol_type = other RNA
gctggagcccagacctctg

SEQ ID NO: 497 - RNA, 19 nt, synthetic construct
  misc_feature 1..19: note = Description of Artificial Sequence: Synthetic oligonucleotide
  source 1..19: mol_type = other RNA
ctggagcccagacctctgg

SEQ ID NO: 498 - RNA, 19 nt, synthetic construct
  misc_feature 1..19: note = Description of Artificial Sequence: Synthetic oligonucleotide
  source 1..19: mol_type = other RNA
tggagcccagacctctggc

SEQ ID NO: 499 - RNA, 19 nt, synthetic construct
  misc_feature 1..19: note = Description of Artificial Sequence: Synthetic oligonucleotide
  source 1..19: mol_type = other RNA
ggagcccagacctctggca

SEQ ID NO: 500 - RNA, 19 nt, synthetic construct
  misc_feature 1..19: note = Description of Artificial Sequence: Synthetic oligonucleotide
  source 1..19: mol_type = other RNA
gagcccagacctctggcag

SEQ ID NO: 501 - RNA, 19 nt, synthetic construct
  misc_feature 1..19: note = Description of Artificial Sequence: Synthetic oligonucleotide
  source 1..19: mol_type = other RNA
agcccagacctctggcagc

SEQ ID NO: 502 - RNA, 19 nt, synthetic construct
  misc_feature 1..19: note = Description of Artificial Sequence: Synthetic oligonucleotide
  source 1..19: mol_type = other RNA
gcccagacctctggcagct

SEQ ID NO: 503 - RNA, 19 nt, synthetic construct
  misc_feature 1..19: note = Description of Artificial Sequence: Synthetic oligonucleotide
  source 1..19: mol_type = other RNA
cccagacctctggcagctc

SEQ ID NO: 504 - RNA, 19 nt, synthetic construct
  misc_feature 1..19: note = Description of Artificial Sequence: Synthetic oligonucleotide
  source 1..19: mol_type = other RNA
ccagacctctggcagctct

SEQ ID NO: 505 - RNA, 19 nt, synthetic construct
  misc_feature 1..19: note = Description of Artificial Sequence: Synthetic oligonucleotide
  source 1..19: mol_type = other RNA
cagacctctggcagctctc

SEQ ID NO: 506 - RNA, 19 nt, synthetic construct
  misc_feature 1..19: note = Description of Artificial Sequence: Synthetic oligonucleotide
  source 1..19: mol_type = other RNA
agacctctggcagctctca

SEQ ID NO: 507 - RNA, 19 nt, synthetic construct
  misc_feature 1..19: note = Description of Artificial Sequence: Synthetic oligonucleotide
  source 1..19: mol_type = other RNA
gacctctggcagctctcac

SEQ ID NO: 508 - RNA, 19 nt, synthetic construct
  misc_feature 1..19: note = Description of Artificial Sequence: Synthetic oligonucleotide
  source 1..19: mol_type = other RNA
acctctggcagctctcact

SEQ ID NO: 509 - RNA, 19 nt, synthetic construct
  misc_feature 1..19: note = Description of Artificial Sequence: Synthetic oligonucleotide
  source 1..19: mol_type = other RNA
cctctggcagctctcactt

SEQ ID NO: 510 - RNA, 19 nt, synthetic construct
  misc_feature 1..19: note = Description of Artificial Sequence: Synthetic oligonucleotide
  source 1..19: mol_type = other RNA
ctctggcagctctcacttt

SEQ ID NO: 511 - RNA, 19 nt, synthetic construct
  misc_feature 1..19: note = Description of Artificial Sequence: Synthetic oligonucleotide
  source 1..19: mol_type = other RNA
tctggcagctctcactttc

SEQ ID NO: 512 - RNA, 19 nt, synthetic construct
  misc_feature 1..19: note = Description of Artificial Sequence: Synthetic oligonucleotide
  source 1..19: mol_type = other RNA
ctggcagctctcactttca

SEQ ID NO: 513 - RNA, 19 nt, synthetic construct
  misc_feature 1..19: note = Description of Artificial Sequence: Synthetic oligonucleotide
  source 1..19: mol_type = other RNA
tggcagctctcactttcac

SEQ ID NO: 514 - RNA, 19 nt, synthetic construct
  misc_feature 1..19: note = Description of Artificial Sequence: Synthetic oligonucleotide
  source 1..19: mol_type = other RNA
ggcagctctcactttcaca

SEQ ID NO: 515 - RNA, 19 nt, synthetic construct
  misc_feature 1..19: note = Description of Artificial Sequence: Synthetic oligonucleotide
  source 1..19: mol_type = other RNA
gcagctctcactttcacaa

SEQ ID NO: 516 - RNA, 19 nt, synthetic construct
  misc_feature 1..19: note = Description of Artificial Sequence: Synthetic oligonucleotide
  source 1..19: mol_type = other RNA
cagctctcactttcacaat

SEQ ID NO: 517 - RNA, 19 nt, synthetic construct
  misc_feature 1..19: note = Description of Artificial Sequence: Synthetic oligonucleotide
  source 1..19: mol_type = other RNA
agctctcactttcacaatg

SEQ ID NO: 518 - RNA, 19 nt, synthetic construct
  misc_feature 1..19: note = Description of Artificial Sequence: Synthetic oligonucleotide
  source 1..19: mol_type = other RNA
gctctcactttcacaatgc

SEQ ID NO: 519 - RNA, 19 nt, synthetic construct
  misc_feature 1..19: note = Description of Artificial Sequence: Synthetic oligonucleotide
  source 1..19: mol_type = other RNA
ctctcactttcacaatgcc

SEQ ID NO: 520 - RNA, 19 nt, synthetic construct
  misc_feature 1..19: note = Description of Artificial Sequence: Synthetic oligonucleotide
  source 1..19: mol_type = other RNA
tctcactttcacaatgccc

SEQ ID NO: 521 - RNA, 19 nt, synthetic construct
  misc_feature 1..19: note = Description of Artificial Sequence: Synthetic oligonucleotide
  source 1..19: mol_type = other RNA
ctcactttcacaatgccct

SEQ ID NO: 522 - RNA, 19 nt, synthetic construct
  misc_feature 1..19: note = Description of Artificial Sequence: Synthetic oligonucleotide
  source 1..19: mol_type = other RNA
tcactttcacaatgccctt

SEQ ID NO: 523 - RNA, 19 nt, synthetic construct
  misc_feature 1..19: note = Description of Artificial Sequence: Synthetic oligonucleotide
  source 1..19: mol_type = other RNA
cactttcacaatgcccttg

SEQ ID NO: 524 - RNA, 19 nt, synthetic construct
  misc_feature 1..19: note = Description of Artificial Sequence: Synthetic oligonucleotide
  source 1..19: mol_type = other RNA
actttcacaatgcccttgg

SEQ ID NO: 525 - RNA, 19 nt, synthetic construct
  misc_feature 1..19: note = Description of Artificial Sequence: Synthetic oligonucleotide
  source 1..19: mol_type = other RNA
ctttcacaatgcccttggg

SEQ ID NO: 526 - RNA, 19 nt, synthetic construct
  misc_feature 1..19: note = Description of Artificial Sequence: Synthetic oligonucleotide
  source 1..19: mol_type = other RNA
tttcacaatgcccttgggc

SEQ ID NO: 527 - RNA, 19 nt, synthetic construct
  misc_feature 1..19: note = Description of Artificial Sequence: Synthetic oligonucleotide
  source 1..19: mol_type = other RNA
ttcacaatgcccttgggct

SEQ ID NO: 528 - RNA, 19 nt, synthetic construct
  misc_feature 1..19: note = Description of Artificial Sequence: Synthetic oligonucleotide
  source 1..19: mol_type = other RNA
tcacaatgcccttgggctg

SEQ ID NO: 529 - RNA, 19 nt, synthetic construct
  misc_feature 1..19: note = Description of Artificial Sequence: Synthetic oligonucleotide
  source 1..19: mol_type = other RNA
cacaatgcccttgggctga

SEQ ID NO: 530 - RNA, 19 nt, synthetic construct
  misc_feature 1..19: note = Description of Artificial Sequence: Synthetic oligonucleotide
  source 1..19: mol_type = other RNA
acaatgcccttgggctgac

SEQ ID NO: 531 - RNA, 19 nt, synthetic construct
  misc_feature 1..19: note = Description of Artificial Sequence: Synthetic oligonucleotide
  source 1..19: mol_type = other RNA
caatgcccttgggctgact

SEQ ID NO: 532 - RNA, 19 nt, synthetic construct
  misc_feature 1..19: note = Description of Artificial Sequence: Synthetic oligonucleotide
  source 1..19: mol_type = other RNA
aatgcccttgggctgacta

SEQ ID NO: 533 - RNA, 19 nt, synthetic construct
  misc_feature 1..19: note = Description of Artificial Sequence: Synthetic oligonucleotide
  source 1..19: mol_type = other RNA
atgcccttgggctgactag

SEQ ID NO: 534 - RNA, 19 nt, synthetic construct
  misc_feature 1..19: note = Description of Artificial Sequence: Synthetic oligonucleotide
  source 1..19: mol_type = other RNA
tgcccttgggctgactagg

SEQ ID NO: 535 - RNA, 19 nt, synthetic construct
  misc_feature 1..19: note = Description of Artificial Sequence: Synthetic oligonucleotide
  source 1..19: mol_type = other RNA
gcccttgggctgactaggc

SEQ ID NO: 536 - RNA, 19 nt, synthetic construct
  misc_feature 1..19: note = Description of Artificial Sequence: Synthetic oligonucleotide
  source 1..19: mol_type = other RNA
cccttgggctgactaggct

SEQ ID NO: 537 - RNA, 19 nt, synthetic construct
  misc_feature 1..19: note = Description of Artificial Sequence: Synthetic oligonucleotide
  source 1..19: mol_type = other RNA
ccttgggctgactaggctg

SEQ ID NO: 538 - RNA, 19 nt, synthetic construct
  misc_feature 1..19: note = Description of Artificial Sequence: Synthetic oligonucleotide
  source 1..19: mol_type = other RNA
cttgggctgactaggctgc

SEQ ID NO: 539 - RNA, 19 nt, synthetic construct
  misc_feature 1..19: note = Description of Artificial Sequence: Synthetic oligonucleotide
  source 1..19: mol_type = other RNA
ttgggctgactaggctgca

SEQ ID NO: 540 - RNA, 19 nt, synthetic construct
  misc_feature 1..19: note = Description of Artificial Sequence: Synthetic oligonucleotide
  source 1..19: mol_type = other RNA
tgggctgactaggctgcag

SEQ ID NO: 541 - RNA, 19 nt, synthetic construct
  misc_feature 1..19: note = Description of Artificial Sequence: Synthetic oligonucleotide
  source 1..19: mol_type = other RNA
gggctgactaggctgcaga

SEQ ID NO: 542 - RNA, 19 nt, synthetic construct
  misc_feature 1..19: note = Description of Artificial Sequence: Synthetic oligonucleotide
  source 1..19: mol_type = other RNA
ggctgactaggctgcagag

SEQ ID NO: 543 - RNA, 19 nt, synthetic construct
  misc_feature 1..19: note = Description of Artificial Sequence: Synthetic oligonucleotide
  source 1..19: mol_type = other RNA
gctgactaggctgcagagg

SEQ ID NO: 544 - RNA, 19 nt, synthetic construct
  misc_feature 1..19: note = Description of Artificial Sequence: Synthetic oligonucleotide
  source 1..19: mol_type = other RNA
ctgactaggctgcagaggg

SEQ ID NO: 545 - RNA, 19 nt, synthetic construct
  misc_feature 1..19: note = Description of Artificial Sequence: Synthetic oligonucleotide
  source 1..19: mol_type = other RNA
tgactaggctgcagagggg

SEQ ID NO: 546 - RNA, 19 nt, synthetic construct
  misc_feature 1..19: note = Description of Artificial Sequence: Synthetic oligonucleotide
  source 1..19: mol_type = other RNA
gactaggctgcagaggggt

SEQ ID NO: 547 - RNA, 19 nt, synthetic construct
  misc_feature 1..19: note = Description of Artificial Sequence: Synthetic oligonucleotide
  source 1..19: mol_type = other RNA
actaggctgcagaggggtt

SEQ ID NO: 548 - RNA, 19 nt, synthetic construct
  misc_feature 1..19: note = Description of Artificial Sequence: Synthetic oligonucleotide
  source 1..19: mol_type = other RNA
ctaggctgcagaggggttt

SEQ ID NO: 549 - RNA, 19 nt, synthetic construct
  misc_feature 1..19: note = Description of Artificial Sequence: Synthetic oligonucleotide
  source 1..19: mol_type = other RNA
taggctgcagaggggtttc

SEQ ID NO: 550 - RNA, 19 nt, synthetic construct
  misc_feature 1..19: note = Description of Artificial Sequence: Synthetic oligonucleotide
  source 1..19: mol_type = other RNA
aggctgcagaggggtttca

SEQ ID NO: 551 - RNA, 19 nt, synthetic construct
  misc_feature 1..19: note = Description of Artificial Sequence: Synthetic oligonucleotide
  source 1..19: mol_type = other RNA
ggctgcagaggggtttcac

SEQ ID NO: 552 - RNA, 19 nt, synthetic construct
  misc_feature 1..19: note = Description of Artificial Sequence: Synthetic oligonucleotide
  source 1..19: mol_type = other RNA
gctgcagaggggtttcacc

SEQ ID NO: 553 - RNA, 19 nt, synthetic construct
  misc_feature 1..19: note = Description of Artificial Sequence: Synthetic oligonucleotide
  source 1..19: mol_type = other RNA
ctgcagaggggtttcaccc

SEQ ID NO: 554 - RNA, 19 nt, synthetic construct
  misc_feature 1..19: note = Description of Artificial Sequence: Synthetic oligonucleotide
  source 1..19: mol_type = other RNA
tgcagaggggtttcacccc

SEQ ID NO: 555 - RNA, 19 nt, synthetic construct
  misc_feature 1..19: note = Description of Artificial Sequence: Synthetic oligonucleotide
  source 1..19: mol_type = other RNA
gcagaggggtttcacccca

SEQ ID NO: 556 - RNA, 19 nt, synthetic construct
  misc_feature 1..19: note = Description of Artificial Sequence: Synthetic oligonucleotide
  source 1..19: mol_type = other RNA
cagaggggtttcaccccaa

SEQ ID NO: 557 - RNA, 19 nt, synthetic construct
  misc_feature 1..19: note = Description of Artificial Sequence: Synthetic oligonucleotide
  source 1..19: mol_type = other RNA
agaggggtttcaccccaac

SEQ ID NO: 558 - RNA, 19 nt, synthetic construct
  misc_feature 1..19: note = Description of Artificial Sequence: Synthetic oligonucleotide
  source 1..19: mol_type = other RNA
gaggggtttcaccccaacc

SEQ ID NO: 559 - RNA, 19 nt, synthetic construct
  misc_feature 1..19: note = Description of Artificial Sequence: Synthetic oligonucleotide
  source 1..19: mol_type = other RNA
aggggtttcaccccaaccc

SEQ ID NO: 560 - RNA, 19 nt, synthetic construct
  misc_feature 1..19: note = Description of Artificial Sequence: Synthetic oligonucleotide
  source 1..19: mol_type = other RNA
ggggtttcaccccaacccc

SEQ ID NO: 561 - RNA, 19 nt, synthetic construct
  misc_feature 1..19: note = Description of Artificial Sequence: Synthetic oligonucleotide
  source 1..19: mol_type = other RNA
gggtttcaccccaacccca

SEQ ID NO: 562 - RNA, 19 nt, synthetic construct
  misc_feature 1..19: note = Description of Artificial Sequence: Synthetic oligonucleotide
  source 1..19: mol_type = other RNA
ggtttcaccccaaccccag

SEQ ID NO: 563 - RNA, 19 nt, synthetic construct
  misc_feature 1..19: note = Description of Artificial Sequence: Synthetic oligonucleotide
  source 1..19: mol_type = other RNA
gtttcaccccaaccccagg

SEQ ID NO: 564 - RNA, 19 nt, synthetic construct
  misc_feature 1..19: note = Description of Artificial Sequence: Synthetic oligonucleotide
  source 1..19: mol_type = other RNA
tttcaccccaaccccaggg

SEQ ID NO: 565 - RNA, 19 nt, synthetic construct
  misc_feature 1..19: note = Description of Artificial Sequence: Synthetic oligonucleotide
  source 1..19: mol_type = other RNA
ttcaccccaaccccagggc

SEQ ID NO: 566 - RNA, 19 nt, synthetic construct
  misc_feature 1..19: note = Description of Artificial Sequence: Synthetic oligonucleotide
  source 1..19: mol_type = other RNA
tcaccccaaccccagggca

SEQ ID NO: 567 - RNA, 19 nt, synthetic construct
  misc_feature 1..19: note = Description of Artificial Sequence: Synthetic oligonucleotide
  source 1..19: mol_type = other RNA
caccccaaccccagggcac

SEQ ID NO: 568 - RNA, 19 nt, synthetic construct
  misc_feature 1..19: note = Description of Artificial Sequence: Synthetic oligonucleotide
  source 1..19: mol_type = other RNA
accccaaccccagggcacc

SEQ ID NO: 569 - RNA, 19 nt, synthetic construct
  misc_feature 1..19: note = Description of Artificial Sequence: Synthetic oligonucleotide
  source 1..19: mol_type = other RNA
ccccaaccccagggcacct

SEQ ID NO: 570 - RNA, 19 nt, synthetic construct
  misc_feature 1..19: note = Description of Artificial Sequence: Synthetic oligonucleotide
  source 1..19: mol_type = other RNA
cccaaccccagggcacctc

SEQ ID NO: 571 - RNA, 19 nt, synthetic construct
  misc_feature 1..19: note = Description of Artificial Sequence: Synthetic oligonucleotide
  source 1..19: mol_type = other RNA
ccaaccccagggcacctca

SEQ ID NO: 572 - RNA, 19 nt, synthetic construct
  misc_feature 1..19: note = Description of Artificial Sequence: Synthetic oligonucleotide
  source 1..19: mol_type = other RNA
caaccccagggcacctcaa

SEQ ID NO: 573 - RNA, 19 nt, synthetic construct
  misc_feature 1..19: note = Description of Artificial Sequence: Synthetic oligonucleotide
  source 1..19: mol_type = other RNA
aaccccagggcacctcaag

SEQ ID NO: 574 - RNA, 19 nt, synthetic construct
  misc_feature 1..19: note = Description of Artificial Sequence: Synthetic oligonucleotide
  source 1..19: mol_type = other RNA
accccagggcacctcaagt

SEQ ID NO: 575 - RNA, 19 nt, synthetic construct
  misc_feature 1..19: note = Description of Artificial Sequence: Synthetic oligonucleotide
  source 1..19: mol_type = other RNA
ccccagggcacctcaagtg

SEQ ID NO: 576 - RNA, 19 nt, synthetic construct
  misc_feature 1..19: note = Description of Artificial Sequence: Synthetic oligonucleotide
  source 1..19: mol_type = other RNA
cccagggcacctcaagtgt

SEQ ID NO: 577 - RNA, 19 nt, synthetic construct
  misc_feature 1..19: note = Description of Artificial Sequence: Synthetic oligonucleotide
  source 1..19: mol_type = other RNA
ccagggcacctcaagtgtc

SEQ ID NO: 578 - RNA, 19 nt, synthetic construct
  misc_feature 1..19: note = Description of Artificial Sequence: Synthetic oligonucleotide
  source 1..19: mol_type = other RNA
cagggcacctcaagtgtcc

SEQ ID NO: 579 - RNA, 19 nt, synthetic construct
  misc_feature 1..19: note = Description of Artificial Sequence: Synthetic oligonucleotide
  source 1..19: mol_type = other RNA
agggcacctcaagtgtccc

SEQ ID NO: 580 - RNA, 19 nt, synthetic construct
  misc_feature 1..19: note = Description of Artificial Sequence: Synthetic oligonucleotide
  source 1..19: mol_type = other RNA
gggcacctcaagtgtcccc

SEQ ID NO: 581 - RNA, 19 nt, synthetic construct
  misc_feature 1..19: note = Description of Artificial Sequence: Synthetic oligonucleotide
  source 1..19: mol_type = other RNA
ggcacctcaagtgtcccca

SEQ ID NO: 582 - RNA, 19 nt, synthetic construct
  misc_feature 1..19: note = Description of Artificial Sequence: Synthetic oligonucleotide
  source 1..19: mol_type = other RNA
gcacctcaagtgtccccac

SEQ ID NO: 583 - RNA, 19 nt, synthetic construct
  misc_feature 1..19: note = Description of Artificial Sequence: Synthetic oligonucleotide
  source 1..19: mol_type = other RNA
cacctcaagtgtccccacc

SEQ ID NO: 584 - RNA, 19 nt, synthetic construct
  misc_feature 1..19: note = Description of Artificial Sequence: Synthetic oligonucleotide
  source 1..19: mol_type = other RNA
acctcaagtgtccccacca

SEQ ID NO: 585 - RNA, 19 nt, synthetic construct
  misc_feature 1..19: note = Description of Artificial Sequence: Synthetic oligonucleotide
  source 1..19: mol_type = other RNA
cctcaagtgtccccaccaa

SEQ ID NO: 586 - RNA, 19 nt, synthetic construct
  misc_feature 1..19: note = Description of Artificial Sequence: Synthetic oligonucleotide
  source 1..19: mol_type = other RNA
ctcaagtgtccccaccaaa

SEQ ID NO: 587 - RNA, 19 nt, synthetic construct
  misc_feature 1..19: note = Description of Artificial Sequence: Synthetic oligonucleotide
  source 1..19: mol_type = other RNA
tcaagtgtccccaccaaac

SEQ ID NO: 588 - RNA, 19 nt, synthetic construct
  misc_feature 1..19: note = Description of Artificial Sequence: Synthetic oligonucleotide
  source 1..19: mol_type = other RNA
caagtgtccccaccaaacc

SEQ ID NO: 589 - RNA, 19 nt, synthetic construct
  misc_feature 1..19: note = Description of Artificial Sequence: Synthetic oligonucleotide
  source 1..19: mol_type = other RNA
aagtgtccccaccaaacct

SEQ ID NO: 590 - RNA, 19 nt, synthetic construct
  misc_feature 1..19: note = Description of Artificial Sequence: Synthetic oligonucleotide
  source 1..19: mol_type = other RNA
agtgtccccaccaaacctt

SEQ ID NO: 591 - RNA, 19 nt, synthetic construct
  misc_feature 1..19: note = Description of Artificial Sequence: Synthetic oligonucleotide
  source 1..19: mol_type = other RNA
gtgtccccaccaaaccttc

SEQ ID NO: 592 - RNA, 19 nt, synthetic construct
  misc_feature 1..19: note = Description of Artificial Sequence: Synthetic oligonucleotide
  source 1..19: mol_type = other RNA
tgtccccaccaaaccttcc

SEQ ID NO: 593 - RNA, 19 nt, synthetic construct
  misc_feature 1..19: note = Description of Artificial Sequence: Synthetic oligonucleotide
  source 1..19: mol_type = other RNA
gtccccaccaaaccttcct

SEQ ID NO: 594 - RNA, 19 nt, synthetic construct
  misc_feature 1..19: note = Description of Artificial Sequence: Synthetic oligonucleotide
  source 1..19: mol_type = other RNA
tccccaccaaaccttccta

SEQ ID NO: 595 - RNA, 19 nt, synthetic construct
  misc_feature 1..19: note = Description of Artificial Sequence: Synthetic oligonucleotide
  source 1..19: mol_type = other RNA
ccccaccaaaccttcctaa

SEQ ID NO: 596 - RNA, 19 nt, synthetic construct
  misc_feature 1..19: note = Description of Artificial Sequence: Synthetic oligonucleotide
  source 1..19: mol_type = other RNA
cccaccaaaccttcctaac

SEQ ID NO: 597 - RNA, 19 nt, synthetic construct
  misc_feature 1..19: note = Description of Artificial Sequence: Synthetic oligonucleotide
  source 1..19: mol_type = other RNA
ccaccaaaccttcctaaca

SEQ ID NO: 598 - RNA, 19 nt, synthetic construct
  misc_feature 1..19: note = Description of Artificial Sequence: Synthetic oligonucleotide
  source 1..19: mol_type = other RNA
caccaaaccttcctaacac

SEQ ID NO: 599 - RNA, 19 nt, synthetic construct
  misc_feature 1..19: note = Description of Artificial Sequence: Synthetic oligonucleotide
  source 1..19: mol_type = other RNA
accaaaccttcctaacacc

SEQ ID NO: 600 - RNA, 19 nt, synthetic construct
  misc_feature 1..19: note = Description of Artificial Sequence: Synthetic oligonucleotide
  source 1..19: mol_type = other RNA
ccaaaccttcctaacacct

SEQ ID NO: 601 - RNA, 19 nt, synthetic construct
  misc_feature 1..19: note = Description of Artificial Sequence: Synthetic oligonucleotide
  source 1..19: mol_type = other RNA
caaaccttcctaacacctg

SEQ ID NO: 602 - RNA, 19 nt, synthetic construct
  misc_feature 1..19: note = Description of Artificial Sequence: Synthetic oligonucleotide
  source 1..19: mol_type = other RNA
aaaccttcctaacacctgt

SEQ ID NO: 603 - RNA, 19 nt, synthetic construct
  misc_feature 1..19: note = Description of Artificial Sequence: Synthetic oligonucleotide
  source 1..19: mol_type = other RNA
aaccttcctaacacctgtc

SEQ ID NO: 604 - RNA, 19 nt, synthetic construct
  misc_feature 1..19: note = Description of Artificial Sequence: Synthetic oligonucleotide
  source 1..19: mol_type = other RNA
accttcctaacacctgtcc

SEQ ID NO: 605 - RNA, 19 nt, synthetic construct
  misc_feature 1..19: note = Description of Artificial Sequence: Synthetic oligonucleotide
  source 1..19: mol_type = other RNA
ccttcctaacacctgtcca

SEQ ID NO: 606 - RNA, 19 nt, synthetic construct
  misc_feature 1..19: note = Description of Artificial Sequence: Synthetic oligonucleotide
  source 1..19: mol_type = other RNA
cttcctaacacctgtccac

SEQ ID NO: 607 - RNA, 19 nt, synthetic construct
  misc_feature 1..19: note = Description of Artificial Sequence: Synthetic oligonucleotide
  source 1..19: mol_type = other RNA
ttcctaacacctgtccact

SEQ ID NO: 608 - RNA, 19 nt, synthetic construct
  misc_feature 1..19: note = Description of Artificial Sequence: Synthetic oligonucleotide
  source 1..19: mol_type = other RNA
tcctaacacctgtccacta

SEQ ID NO: 609 - RNA, 19 nt, synthetic construct
  misc_feature 1..19: note = Description of Artificial Sequence: Synthetic oligonucleotide
  source 1..19: mol_type = other RNA
cctaacacctgtccactaa

SEQ ID NO: 610 - RNA, 19 nt, synthetic construct
  misc_feature 1..19: note = Description of Artificial Sequence: Synthetic oligonucleotide
  source 1..19: mol_type = other RNA
ctaacacctgtccactaag

SEQ ID NO: 611 - RNA, 19 nt, synthetic construct
  misc_feature 1..19: note = Description of Artificial Sequence: Synthetic oligonucleotide
  source 1..19: mol_type = other RNA
taacacctgtccactaagc

SEQ ID NO: 612 - RNA, 19 nt, synthetic construct
  misc_feature 1..19: note = Description of Artificial Sequence: Synthetic oligonucleotide
  source 1..19: mol_type = other RNA
aacacctgtccactaagct

SEQ ID NO: 613 - RNA, 19 nt, synthetic construct
  misc_feature 1..19: note = Description of Artificial Sequence: Synthetic oligonucleotide
  source 1..19: mol_type = other RNA
acacctgtccactaagctg

SEQ ID NO: 614 - RNA, 19 nt, synthetic construct
  misc_feature 1..19: note = Description of Artificial Sequence: Synthetic oligonucleotide
  source 1..19: mol_type = other RNA
cacctgtccactaagctgt

SEQ ID NO: 615 - RNA, 19 nt, synthetic construct
  misc_feature 1..19: note = Description of Artificial Sequence: Synthetic oligonucleotide
  source 1..19: mol_type = other RNA
acctgtccactaagctgta

SEQ ID NO: 616 - RNA, 19 nt, synthetic construct
  misc_feature 1..19: note = Description of Artificial Sequence: Synthetic oligonucleotide
  source 1..19: mol_type = other RNA
cctgtccactaagctgtac

SEQ ID NO: 617 - RNA, 19 nt, synthetic construct
  misc_feature 1..19: note = Description of Artificial Sequence: Synthetic oligonucleotide
  source 1..19: mol_type = other RNA
ctgtccactaagctgtact

SEQ ID NO: 618 - RNA, 19 nt, synthetic construct
  misc_feature 1..19: note = Description of Artificial Sequence: Synthetic oligonucleotide
  source 1..19: mol_type = other RNA
tgtccactaagctgtacta

SEQ ID NO: 619 - RNA, 19 nt, synthetic construct
  misc_feature 1..19: note = Description of Artificial Sequence: Synthetic oligonucleotide
  source 1..19: mol_type = other RNA
gtccactaagctgtactag

SEQ ID NO: 620 - RNA, 19 nt, synthetic construct
  misc_feature 1..19: note = Description of Artificial Sequence: Synthetic oligonucleotide
  source 1..19: mol_type = other RNA
tccactaagctgtactagg

SEQ ID NO: 621 - RNA, 19 nt, synthetic construct
  misc_feature 1..19: note = Description of Artificial Sequence: Synthetic oligonucleotide
  source 1..19: mol_type = other RNA
ccactaagctgtactaggc

SEQ ID NO: 622 - RNA, 19 nt, synthetic construct
  misc_feature 1..19: note = Description of Artificial Sequence: Synthetic oligonucleotide
  source 1..19: mol_type = other RNA
cactaagctgtactaggcc

SEQ ID NO: 623 - RNA, 19 nt, synthetic construct
  misc_feature 1..19: note = Description of Artificial Sequence: Synthetic oligonucleotide
  source 1..19: mol_type = other RNA
actaagctgtactaggccc

SEQ ID NO: 624 - RNA, 19 nt, synthetic construct
  misc_feature 1..19: note = Description of Artificial Sequence: Synthetic oligonucleotide
  source 1..19: mol_type = other RNA
ctaagctgtactaggccct

SEQ ID NO: 625 - RNA, 19 nt, synthetic construct
  misc_feature 1..19: note = Description of Artificial Sequence: Synthetic oligonucleotide
  source 1..19: mol_type = other RNA
taagctgtactaggccctt

SEQ ID NO: 626 - RNA, 19 nt, synthetic construct
  misc_feature 1..19: note = Description of Artificial Sequence: Synthetic oligonucleotide
  source 1..19: mol_type = other RNA
aagctgtactaggcccttg

SEQ ID NO: 627 - RNA, 19 nt, synthetic construct
  misc_feature 1..19: note = Description of Artificial Sequence: Synthetic oligonucleotide
  source 1..19: mol_type = other RNA
agctgtactaggcccttgc

SEQ ID NO: 628 - RNA, 19 nt, synthetic construct
  misc_feature 1..19: note = Description of Artificial Sequence: Synthetic oligonucleotide
  source 1..19: mol_type = other RNA
gctgtactaggcccttgca

SEQ ID NO: 629 - RNA, 19 nt, synthetic construct
  misc_feature 1..19: note = Description of Artificial Sequence: Synthetic oligonucleotide
  source 1..19: mol_type = other RNA
ctgtactaggcccttgcaa

SEQ ID NO: 630 - RNA, 19 nt, synthetic construct
  misc_feature 1..19: note = Description of Artificial Sequence: Synthetic oligonucleotide
  source 1..19: mol_type = other RNA
tgtactaggcccttgcaac

SEQ ID NO: 631 - RNA, 19 nt, synthetic construct
  misc_feature 1..19: note = Description of Artificial Sequence: Synthetic oligonucleotide
  source 1..19: mol_type = other RNA
gtactaggcccttgcaact

SEQ ID NO: 632 - RNA, 19 nt, synthetic construct
  misc_feature 1..19: note = Description of Artificial Sequence: Synthetic oligonucleotide
  source 1..19: mol_type = other RNA
tactaggcccttgcaactg

SEQ ID NO: 633 - RNA, 19 nt, synthetic construct
  misc_feature 1..19: note = Description of Artificial Sequence: Synthetic oligonucleotide
  source 1..19: mol_type = other RNA
actaggcccttgcaactga

SEQ ID NO: 634 - RNA, 19 nt, synthetic construct
  misc_feature 1..19: note = Description of Artificial Sequence: Synthetic oligonucleotide
  source 1..19: mol_type = other RNA
ctaggcccttgcaactgac

SEQ ID NO: 635 - RNA, 19 nt, synthetic construct
  misc_feature 1..19: note = Description of Artificial Sequence: Synthetic oligonucleotide
  source 1..19: mol_type = other RNA
taggcccttgcaactgacc

SEQ ID NO: 636 - RNA, 19 nt, synthetic construct
  misc_feature 1..19: note = Description of Artificial Sequence: Synthetic oligonucleotide
  source 1..19: mol_type = other RNA
aggcccttgcaactgacct

SEQ ID NO: 637 - RNA, 19 nt, synthetic construct
  misc_feature 1..19: note = Description of Artificial Sequence: Synthetic oligonucleotide
  source 1..19: mol_type = other RNA
ggcccttgcaactgaccta

SEQ ID NO: 638 - RNA, 19 nt, synthetic construct
  misc_feature 1..19: note = Description of Artificial Sequence: Synthetic oligonucleotide
  source 1..19: mol_type = other RNA
gcccttgcaactgacctat

SEQ ID NO: 639 - RNA, 19 nt, synthetic construct
  misc_feature 1..19: note = Description of Artificial Sequence: Synthetic oligonucleotide
  source 1..19: mol_type = other RNA
cccttgcaactgacctatg

SEQ ID NO: 640 - RNA, 19 nt, synthetic construct
  misc_feature 1..19: note = Description of Artificial Sequence: Synthetic oligonucleotide
  source 1..19: mol_type = other RNA
ccttgcaactgacctatgg

SEQ ID NO: 641 - RNA, 19 nt, synthetic construct
  misc_feature 1..19: note = Description of Artificial Sequence: Synthetic oligonucleotide
  source 1..19: mol_type = other RNA
cttgcaactgacctatggg

SEQ ID NO: 642 - RNA, 19 nt, synthetic construct
  misc_feature 1..19: note = Description of Artificial Sequence: Synthetic oligonucleotide
  source 1..19: mol_type = other RNA
ttgcaactgacctatggga

SEQ ID NO: 643 - RNA, 19 nt, synthetic construct
  misc_feature 1..19: note = Description of Artificial Sequence: Synthetic oligonucleotide
  source 1..19: mol_type = other RNA
tgcaactgacctatgggac

SEQ ID NO: 644 - RNA, 19 nt, synthetic construct
  misc_feature 1..19: note = Description of Artificial Sequence: Synthetic oligonucleotide
  source 1..19: mol_type = other RNA
gcaactgacctatgggacc

SEQ ID NO: 645 - RNA, 19 nt, synthetic construct
  misc_feature 1..19: note = Description of Artificial Sequence: Synthetic oligonucleotide
  source 1..19: mol_type = other RNA
caactgacctatgggacct

SEQ ID NO: 646 - RNA, 19 nt, synthetic construct
  misc_feature 1..19: note = Description of Artificial Sequence: Synthetic oligonucleotide
  source 1..19: mol_type = other RNA
aactgacctatgggacctg

SEQ ID NO: 647 - RNA, 19 nt, synthetic construct
  misc_feature 1..19: note = Description of Artificial Sequence: Synthetic oligonucleotide
  source 1..19: mol_type = other RNA
actgacctatgggacctga

SEQ ID NO: 648 - RNA, 19 nt, synthetic construct
  misc_feature 1..19: note = Description of Artificial Sequence: Synthetic oligonucleotide
  source 1..19: mol_type = other RNA
ctgacctatgggacctgag

SEQ ID NO: 649 - RNA, 19 nt, synthetic construct
  misc_feature 1..19: note = Description of Artificial Sequence: Synthetic oligonucleotide
  source 1..19: mol_type = other RNA
tgacctatgggacctgagg

SEQ ID NO: 650 - RNA, 19 nt, synthetic construct
  misc_feature 1..19: note = Description of Artificial Sequence: Synthetic oligonucleotide
  source 1..19: mol_type = other RNA
gacctatgggacctgaggc

SEQ ID NO: 651 - RNA, 19 nt, synthetic construct
  misc_feature 1..19: note = Description of Artificial Sequence: Synthetic oligonucleotide
  source 1..19: mol_type = other RNA
acctatgggacctgaggcc

SEQ ID NO: 652 - RNA, 19 nt, synthetic construct
  misc_feature 1..19: note = Description of Artificial Sequence: Synthetic oligonucleotide
  source 1..19: mol_type = other RNA
cctatgggacctgaggcct

SEQ ID NO: 653 - RNA, 19 nt, synthetic construct
  misc_feature 1..19: note = Description of Artificial Sequence: Synthetic oligonucleotide
  source 1..19: mol_type = other RNA
ctatgggacctgaggcctg

SEQ ID NO: 654 - RNA, 19 nt, synthetic construct
  misc_feature 1..19: note = Description of Artificial Sequence: Synthetic oligonucleotide
  source 1..19: mol_type = other RNA
tatgggacctgaggcctgg

SEQ ID NO: 655 - RNA, 19 nt, synthetic construct
  misc_feature 1..19: note = Description of Artificial Sequence: Synthetic oligonucleotide
  source 1..19: mol_type = other RNA
atgggacctgaggcctggc

SEQ ID NO: 656 - RNA, 19 nt, synthetic construct
  misc_feature 1..19: note = Description of Artificial Sequence: Synthetic oligonucleotide
  source 1..19: mol_type = other RNA
tgggacctgaggcctggcc

SEQ ID NO: 657 - RNA, 19 nt, synthetic construct
  misc_feature 1..19: note = Description of Artificial Sequence: Synthetic oligonucleotide
  source 1..19: mol_type = other RNA
gggacctgaggcctggccc

SEQ ID NO: 658 - RNA, 19 nt, synthetic construct
  misc_feature 1..19: note = Description of Artificial Sequence: Synthetic oligonucleotide
  source 1..19: mol_type = other RNA
ggacctgaggcctggcccc

SEQ ID NO: 659 - RNA, 19 nt, synthetic construct
  misc_feature 1..19: note = Description of Artificial Sequence: Synthetic oligonucleotide
  source 1..19: mol_type = other RNA
gacctgaggcctggcccct

SEQ ID NO: 660 - RNA, 19 nt, synthetic construct
  misc_feature 1..19: note = Description of Artificial Sequence: Synthetic oligonucleotide
  source 1..19: mol_type = other RNA
acctgaggcctggcccctc

SEQ ID NO: 661 - RNA, 19 nt, synthetic construct
  misc_feature 1..19: note = Description of Artificial Sequence: Synthetic oligonucleotide
  source 1..19: mol_type = other RNA
cctgaggcctggcccctca

SEQ ID NO: 662 - RNA, 19 nt, synthetic construct
  misc_feature 1..19: note = Description of Artificial Sequence: Synthetic oligonucleotide
  source 1..19: mol_type = other RNA
ctgaggcctggcccctcat

SEQ ID NO: 663 - RNA, 19 nt, synthetic construct
  misc_feature 1..19: note = Description of Artificial Sequence: Synthetic oligonucleotide
  source 1..19: mol_type = other RNA
tgaggcctggcccctcatg

SEQ ID NO: 664 - RNA, 19 nt, synthetic construct
  misc_feature 1..19: note = Description of Artificial Sequence: Synthetic oligonucleotide
  source 1..19: mol_type = other RNA
gaggcctggcccctcatgg

SEQ ID NO: 665 - RNA, 19 nt, synthetic construct
  misc_feature 1..19: note = Description of Artificial Sequence: Synthetic oligonucleotide
  source 1..19: mol_type = other RNA
aggcctggcccctcatggc

SEQ ID NO: 666 - RNA, 19 nt, synthetic construct
  misc_feature 1..19: note = Description of Artificial Sequence: Synthetic oligonucleotide
  source 1..19: mol_type = other RNA
ggcctggcccctcatggct

SEQ ID NO: 667 - RNA, 19 nt, synthetic construct
  misc_feature 1..19: note = Description of Artificial Sequence: Synthetic oligonucleotide
  source 1..19: mol_type = other RNA
gcctggcccctcatggctc

SEQ ID NO: 668 - RNA, 19 nt, synthetic construct
  misc_feature 1..19: note = Description of Artificial Sequence: Synthetic oligonucleotide
  source 1..19: mol_type = other RNA
cctggcccctcatggctcc

SEQ ID NO: 669 - RNA, 19 nt, synthetic construct
  misc_feature 1..19: note = Description of Artificial Sequence: Synthetic oligonucleotide
  source 1..19: mol_type = other RNA
ctggcccctcatggctcct

SEQ ID NO: 670 - RNA, 19 nt, synthetic construct
  misc_feature 1..19: note = Description of Artificial Sequence: Synthetic oligonucleotide
  source 1..19: mol_type = other RNA
tggcccctcatggctcctg

SEQ ID NO: 671 - RNA, 19 nt, synthetic construct
  misc_feature 1..19: note = Description of Artificial Sequence: Synthetic oligonucleotide
  source 1..19: mol_type = other RNA
ggcccctcatggctcctgt

SEQ ID NO: 672 - RNA, 19 nt, synthetic construct
  misc_feature 1..19: note = Description of Artificial Sequence: Synthetic oligonucleotide
  source 1..19: mol_type = other RNA
gcccctcatggctcctgtc

SEQ ID NO: 673 - RNA, 19 nt, synthetic construct
  misc_feature 1..19: note = Description of Artificial Sequence: Synthetic oligonucleotide
  source 1..19: mol_type = other RNA
cccctcatggctcctgtca

SEQ ID NO: 674 - RNA, 19 nt, synthetic construct
  misc_feature 1..19: note = Description of Artificial Sequence: Synthetic oligonucleotide
  source 1..19: mol_type = other RNA
ccctcatggctcctgtcac

SEQ ID NO: 675 - RNA, 19 nt, synthetic construct
  misc_feature 1..19: note = Description of Artificial Sequence: Synthetic oligonucleotide
  source 1..19: mol_type = other RNA
cctcatggctcctgtcacc

SEQ ID NO: 676 - RNA, 19 nt, synthetic construct
  misc_feature 1..19: note = Description of Artificial Sequence: Synthetic oligonucleotide
  source 1..19: mol_type = other RNA
ctcatggctcctgtcacca

SEQ ID NO: 677 - RNA, 19 nt, synthetic construct
  misc_feature 1..19: note = Description of Artificial Sequence: Synthetic oligonucleotide
  source 1..19: mol_type = other RNA
tcatggctcctgtcaccag

SEQ ID NO: 678 - RNA, 19 nt, synthetic construct
  misc_feature 1..19: note = Description of Artificial Sequence: Synthetic oligonucleotide
  source 1..19: mol_type = other RNA
catggctcctgtcaccagg

SEQ ID NO: 679 - RNA, 19 nt, synthetic construct
  misc_feature 1..19: note = Description of Artificial Sequence: Synthetic oligonucleotide
  source 1..19: mol_type = other RNA
atggctcctgtcaccaggt

SEQ ID NO: 680 - RNA, 19 nt, synthetic construct
  misc_feature 1..19: note = Description of Artificial Sequence: Synthetic oligonucleotide
  source 1..19: mol_type = other RNA
tggctcctgtcaccaggtc

SEQ ID NO: 681 - RNA, 19 nt, synthetic construct
  misc_feature 1..19: note = Description of Artificial Sequence: Synthetic oligonucleotide
  source 1..19: mol_type = other RNA
ggctcctgtcaccaggtct

SEQ ID NO: 682 - RNA, 19 nt, synthetic construct
  misc_feature 1..19: note = Description of Artificial Sequence: Synthetic oligonucleotide
  source 1..19: mol_type = other RNA
gctcctgtcaccaggtctc

SEQ ID NO: 683 - RNA, 19 nt, synthetic construct
  misc_feature 1..19: note = Description of Artificial Sequence: Synthetic oligonucleotide
  source 1..19: mol_type = other RNA
ctcctgtcaccaggtctca

SEQ ID NO: 684 - RNA, 19 nt, synthetic construct
  misc_feature 1..19: note = Description of Artificial Sequence: Synthetic oligonucleotide
  source 1..19: mol_type = other RNA
tcctgtcaccaggtctcag

SEQ ID NO: 685 - RNA, 19 nt, synthetic construct
  misc_feature 1..19: note = Description of Artificial Sequence: Synthetic oligonucleotide
  source 1..19: mol_type = other RNA
cctgtcaccaggtctcagg

SEQ ID NO: 686 - RNA, 19 nt, synthetic construct
  misc_feature 1..19: note = Description of Artificial Sequence: Synthetic oligonucleotide
  source 1..19: mol_type = other RNA
ctgtcaccaggtctcaggt

SEQ ID NO: 687 - RNA, 19 nt, synthetic construct
  misc_feature 1..19: note = Description of Artificial Sequence: Synthetic oligonucleotide
  source 1..19: mol_type = other RNA
tgtcaccaggtctcaggtc

SEQ ID NO: 688 - RNA, 19 nt, synthetic construct
  misc_feature 1..19: note = Description of Artificial Sequence: Synthetic oligonucleotide
  source 1..19: mol_type = other RNA
gtcaccaggtctcaggtca

SEQ ID NO: 689 - RNA, 19 nt, synthetic construct
  misc_feature 1..19: note = Description of Artificial Sequence: Synthetic oligonucleotide
  source 1..19: mol_type = other RNA
tcaccaggtctcaggtcag

SEQ ID NO: 690 - RNA, 19 nt, synthetic construct
  misc_feature 1..19: note = Description of Artificial Sequence: Synthetic oligonucleotide
  source 1..19: mol_type = other RNA
caccaggtctcaggtcagg

SEQ ID NO: 691 - RNA, 19 nt, synthetic construct
  misc_feature 1..19: note = Description of Artificial Sequence: Synthetic oligonucleotide
  source 1..19: mol_type = other RNA
accaggtctcaggtcaggg

SEQ ID NO: 692 - RNA, 19 nt, synthetic construct
  misc_feature 1..19: note = Description of Artificial Sequence: Synthetic oligonucleotide
  source 1..19: mol_type = other RNA
ccaggtctcaggtcagggt

SEQ ID NO: 693 - RNA, 19 nt, synthetic construct
  misc_feature 1..19: note = Description of Artificial Sequence: Synthetic oligonucleotide
  source 1..19: mol_type = other RNA
caggtctcaggtcagggtc

SEQ ID NO: 694 - RNA, 19 nt, synthetic construct
  misc_feature 1..19: note = Description of Artificial Sequence: Synthetic oligonucleotide
  source 1..19: mol_type = other RNA
aggtctcaggtcagggtcc

SEQ ID NO: 695 - RNA, 19 nt, synthetic construct
  misc_feature 1..19: note = Description of Artificial Sequence: Synthetic oligonucleotide
  source 1..19: mol_type = other RNA
ggtctcaggtcagggtcca

SEQ ID NO: 696 - RNA, 19 nt, synthetic construct
  misc_feature 1..19: note = Description of Artificial Sequence: Synthetic oligonucleotide
  source 1..19: mol_type = other RNA
gtctcaggtcagggtccag

SEQ ID NO: 697 - RNA, 19 nt, synthetic construct
  misc_feature 1..19: note = Description of Artificial Sequence: Synthetic oligonucleotide
  source 1..19: mol_type = other RNA
tctcaggtcagggtccagc

SEQ ID NO: 698 - RNA, 19 nt, synthetic construct
  misc_feature 1..19: note = Description of Artificial Sequence: Synthetic oligonucleotide
  source 1..19: mol_type = other RNA
ctcaggtcagggtccagca

SEQ ID NO: 699 - RNA, 19 nt, synthetic construct
  misc_feature 1..19: note = Description of Artificial Sequence: Synthetic oligonucleotide
  source 1..19: mol_type = other RNA
tcaggtcagggtccagcag

SEQ ID NO: 700 - RNA, 19 nt, synthetic construct
  misc_feature 1..19: note = Description of Artificial Sequence: Synthetic oligonucleotide
  source 1..19: mol_type = other RNA
caggtcagggtccagcagg

SEQ ID NO: 701 - RNA, 19 nt, synthetic construct
  misc_feature 1..19: note = Description of Artificial Sequence: Synthetic oligonucleotide
  source 1..19: mol_type = other RNA
aggtcagggtccagcaggc

SEQ ID NO: 702 - RNA, 19 nt, synthetic construct
  misc_feature 1..19: note = Description of Artificial Sequence: Synthetic oligonucleotide
  source 1..19: mol_type = other RNA
ggtcagggtccagcaggcc

SEQ ID NO: 703 - RNA, 19 nt, synthetic construct
  misc_feature 1..19: note = Description of Artificial Sequence: Synthetic oligonucleotide
  source 1..19: mol_type = other RNA
gtcagggtccagcaggccc

SEQ ID NO: 704 - RNA, 19 nt, synthetic construct
  misc_feature 1..19: note = Description of Artificial Sequence: Synthetic oligonucleotide
  source 1..19: mol_type = other RNA
tcagggtccagcaggccct

SEQ ID NO: 705 - RNA, 19 nt, synthetic construct
  misc_feature 1..19: note = Description of Artificial Sequence: Synthetic oligonucleotide
  source 1..19: mol_type = other RNA
cagggtccagcaggccctg

SEQ ID NO: 706 - RNA, 19 nt, synthetic construct
  misc_feature 1..19: note = Description of Artificial Sequence: Synthetic oligonucleotide
  source 1..19: mol_type = other RNA
agggtccagcaggccctga

SEQ ID NO: 707 - RNA, 19 nt, synthetic construct
  misc_feature 1..19: note = Description of Artificial Sequence: Synthetic oligonucleotide
  source 1..19: mol_type = other RNA
gggtccagcaggccctgag

SEQ ID NO: 708 - RNA, 19 nt, synthetic construct
  misc_feature 1..19: note = Description of Artificial Sequence: Synthetic oligonucleotide
  source 1..19: mol_type = other RNA
ggtccagcaggccctgagc

SEQ ID NO: 709 - RNA, 19 nt, synthetic construct
  misc_feature 1..19: note = Description of Artificial Sequence: Synthetic oligonucleotide
  source 1..19: mol_type = other RNA
gtccagcaggccctgagct

SEQ ID NO: 710 - RNA, 19 nt, synthetic construct
  misc_feature 1..19: note = Description of Artificial Sequence: Synthetic oligonucleotide
  source 1..19: mol_type = other RNA
tccagcaggccctgagctg

SEQ ID NO: 711 - RNA, 19 nt, synthetic construct
  misc_feature 1..19: note = Description of Artificial Sequence: Synthetic oligonucleotide
  source 1..19: mol_type = other RNA
ccagcaggccctgagctga

SEQ ID NO: 712 - RNA, 19 nt, synthetic construct
  misc_feature 1..19: note = Description of Artificial Sequence: Synthetic oligonucleotide
  source 1..19: mol_type = other RNA
cagcaggccctgagctgac

SEQ ID NO: 713 - RNA, 19 nt, synthetic construct
  misc_feature 1..19: note = Description of Artificial Sequence: Synthetic oligonucleotide
  source 1..19: mol_type = other RNA
agcaggccctgagctgacg

SEQ ID NO: 714 - RNA, 19 nt, synthetic construct
  misc_feature 1..19: note = Description of Artificial Sequence: Synthetic oligonucleotide
  source 1..19: mol_type = other RNA
gcaggccctgagctgacgt

SEQ ID NO: 715 - RNA, 19 nt, synthetic construct
  misc_feature 1..19: note = Description of Artificial Sequence: Synthetic oligonucleotide
  source 1..19: mol_type = other RNA
caggccctgagctgacgtg

SEQ ID NO: 716 - RNA, 19 nt, synthetic construct
  misc_feature 1..19: note = Description of Artificial Sequence: Synthetic oligonucleotide
  source 1..19: mol_type = other RNA
aggccctgagctgacgtgt

SEQ ID NO: 717 - RNA, 19 nt, synthetic construct
  misc_feature 1..19: note = Description of Artificial Sequence: Synthetic oligonucleotide
  source 1..19: mol_type = other RNA
ggccctgagctgacgtgtg

SEQ ID NO: 718 - RNA, 19 nt, synthetic construct
  misc_feature 1..19: note = Description of Artificial Sequence: Synthetic oligonucleotide
  source 1..19: mol_type = other RNA
gccctgagctgacgtgtgg

SEQ ID NO: 719 - RNA, 19 nt, synthetic construct
  misc_feature 1..19: note = Description of Artificial Sequence: Synthetic oligonucleotide
  source 1..19: mol_type = other RNA
ccctgagctgacgtgtgga

SEQ ID NO: 720 - RNA, 19 nt, synthetic construct
  misc_feature 1..19: note = Description of Artificial Sequence: Synthetic oligonucleotide
  source 1..19: mol_type = other RNA
cctgagctgacgtgtggag

SEQ ID NO: 721 - RNA, 19 nt, synthetic construct
  misc_feature 1..19: note = Description of Artificial Sequence: Synthetic oligonucleotide
  source 1..19: mol_type = other RNA
ctgagctgacgtgtggagc

SEQ ID NO: 722 - RNA, 19 nt, synthetic construct
  misc_feature 1..19: note = Description of Artificial Sequence: Synthetic oligonucleotide
  source 1..19: mol_type = other RNA
tgagctgacgtgtggagcc

SEQ ID NO: 723 - RNA, 19 nt, synthetic construct
  misc_feature 1..19: note = Description of Artificial Sequence: Synthetic oligonucleotide
  source 1..19: mol_type = other RNA
gagctgacgtgtggagcca

SEQ ID NO: 724 - RNA, 19 nt, synthetic construct
  misc_feature 1..19: note = Description of Artificial Sequence: Synthetic oligonucleotide
  source 1..19: mol_type = other RNA
agctgacgtgtggagccag

SEQ ID NO: 725 - RNA, 19 nt, synthetic construct
  misc_feature 1..19: note = Description of Artificial Sequence: Synthetic oligonucleotide
  source 1..19: mol_type = other RNA
gctgacgtgtggagccaga

SEQ ID NO: 726 - RNA, 19 nt, synthetic construct
  misc_feature 1..19: note = Description of Artificial Sequence: Synthetic oligonucleotide
  source 1..19: mol_type = other RNA
ctgacgtgtggagccagag

SEQ ID NO: 727 - RNA, 19 nt, synthetic construct
  misc_feature 1..19: note = Description of Artificial Sequence: Synthetic oligonucleotide
  source 1..19: mol_type = other RNA
tgacgtgtggagccagagc

SEQ ID NO: 728 - RNA, 19 nt, synthetic construct
  misc_feature 1..19: note = Description of Artificial Sequence: Synthetic oligonucleotide
  source 1..19: mol_type = other RNA
gacgtgtggagccagagcc

SEQ ID NO: 729 - RNA, 19 nt, synthetic construct
  misc_feature 1..19: note = Description of Artificial Sequence: Synthetic oligonucleotide
  source 1..19: mol_type = other RNA
acgtgtggagccagagcca

SEQ ID NO: 730 - RNA, 19 nt, synthetic construct
  misc_feature 1..19: note = Description of Artificial Sequence: Synthetic oligonucleotide
  source 1..19: mol_type = other RNA
cgtgtggagccagagccac

SEQ ID NO: 731 - RNA, 19 nt, synthetic construct
  misc_feature 1..19: note = Description of Artificial Sequence: Synthetic oligonucleotide
  source 1..19: mol_type = other RNA
gtgtggagccagagccacc

SEQ ID NO: 732 - RNA, 19 nt, synthetic construct
  misc_feature 1..19: note = Description of Artificial Sequence: Synthetic oligonucleotide
  source 1..19: mol_type = other RNA
tgtggagccagagccaccc

SEQ ID NO: 733 - RNA, 19 nt, synthetic construct
  misc_feature 1..19: note = Description of Artificial Sequence: Synthetic oligonucleotide
  source 1..19: mol_type = other RNA
gtggagccagagccaccca

SEQ ID NO: 734 - RNA, 19 nt, synthetic construct
  misc_feature 1..19: note = Description of Artificial Sequence: Synthetic oligonucleotide
  source 1..19: mol_type = other RNA
tggagccagagccacccaa

SEQ ID NO: 735 - RNA, 19 nt, synthetic construct
  misc_feature 1..19: note = Description of Artificial Sequence: Synthetic oligonucleotide
  source 1..19: mol_type = other RNA
ggagccagagccacccaat

SEQ ID NO: 736 - RNA, 19 nt, synthetic construct
  misc_feature 1..19: note = Description of Artificial Sequence: Synthetic oligonucleotide
  source 1..19: mol_type = other RNA
gagccagagccacccaatc

SEQ ID NO: 737 - RNA, 19 nt, synthetic construct
  misc_feature 1..19: note = Description of Artificial Sequence: Synthetic oligonucleotide
  source 1..19: mol_type = other RNA
agccagagccacccaatcc

SEQ ID NO: 738 - RNA, 19 nt, synthetic construct
  misc_feature 1..19: note = Description of Artificial Sequence: Synthetic oligonucleotide
  source 1..19: mol_type = other RNA
gccagagccacccaatccc

SEQ ID NO: 739 - RNA, 19 nt, synthetic construct
  misc_feature 1..19: note = Description of Artificial Sequence: Synthetic oligonucleotide
  source 1..19: mol_type = other RNA
ccagagccacccaatcccg

SEQ ID NO: 740 - RNA, 19 nt, synthetic construct
  misc_feature 1..19: note = Description of Artificial Sequence: Synthetic oligonucleotide
  source 1..19: mol_type = other RNA
cagagccacccaatcccgt

SEQ ID NO: 741 - RNA, 19 nt, synthetic construct
  misc_feature 1..19: note = Description of Artificial Sequence: Synthetic oligonucleotide
  source 1..19: mol_type = other RNA
agagccacccaatcccgta

SEQ ID NO: 742 - RNA, 19 nt, synthetic construct
  misc_feature 1..19: note = Description of Artificial Sequence: Synthetic oligonucleotide
  source 1..19: mol_type = other RNA
gagccacccaatcccgtag

SEQ ID NO: 743 - RNA, 19 nt, synthetic construct
  misc_feature 1..19: note = Description of Artificial Sequence: Synthetic oligonucleotide
  source 1..19: mol_type = other RNA
agccacccaatcccgtagg

SEQ ID NO: 744 - RNA, 19 nt, synthetic construct
  misc_feature 1..19: note = Description of Artificial Sequence: Synthetic oligonucleotide
  source 1..19: mol_type = other RNA
gccacccaatcccgtaggg

SEQ ID NO: 745 - RNA, 19 nt, synthetic construct
  misc_feature 1..19: note = Description of Artificial Sequence: Synthetic oligonucleotide
  source 1..19: mol_type = other RNA
ccacccaatcccgtaggga

SEQ ID NO: 746 - RNA, 19 nt, synthetic construct
  misc_feature 1..19: note = Description of Artificial Sequence: Synthetic oligonucleotide
  source 1..19: mol_type = other RNA
cacccaatcccgtagggac

SEQ ID NO: 747 - RNA, 19 nt, synthetic construct
  misc_feature 1..19: note = Description of Artificial Sequence: Synthetic oligonucleotide
  source 1..19: mol_type = other RNA
acccaatcccgtagggaca

SEQ ID NO: 748 - RNA, 19 nt, synthetic construct
  misc_feature 1..19: note = Description of Artificial Sequence: Synthetic oligonucleotide
  source 1..19: mol_type = other RNA
cccaatcccgtagggacag

SEQ ID NO: 749 - RNA, 19 nt, synthetic construct
  misc_feature 1..19: note = Description of Artificial Sequence: Synthetic oligonucleotide
  source 1..19: mol_type = other RNA
ccaatcccgtagggacagg

SEQ ID NO: 750 - RNA, 19 nt, synthetic construct
  misc_feature 1..19: note = Description of Artificial Sequence: Synthetic oligonucleotide
  source 1..19: mol_type = other RNA
caatcccgtagggacaggt

SEQ ID NO: 751 - RNA, 19 nt, synthetic construct
  misc_feature 1..19: note = Description of Artificial Sequence: Synthetic oligonucleotide
  source 1..19: mol_type = other RNA
aatcccgtagggacaggtt

SEQ ID NO: 752 - RNA, 19 nt, synthetic construct
  misc_feature 1..19: note = Description of Artificial Sequence: Synthetic oligonucleotide
  source 1..19: mol_type = other RNA
atcccgtagggacaggttt

SEQ ID NO: 753 - RNA, 19 nt, synthetic construct
  misc_feature 1..19: note = Description of Artificial Sequence: Synthetic oligonucleotide
  source 1..19: mol_type = other RNA
tcccgtagggacaggtttc

SEQ ID NO: 754 - RNA, 19 nt, synthetic construct
  misc_feature 1..19: note = Description of Artificial Sequence: Synthetic oligonucleotide
  source 1..19: mol_type = other RNA
cccgtagggacaggtttca

SEQ ID NO: 755 - RNA, 19 nt, synthetic construct
  misc_feature 1..19: note = Description of Artificial Sequence: Synthetic oligonucleotide
  source 1..19: mol_type = other RNA
ccgtagggacaggtttcac

SEQ ID NO: 756 - RNA, 19 nt, synthetic construct
  misc_feature 1..19: note = Description of Artificial Sequence: Synthetic oligonucleotide
  source 1..19: mol_type = other RNA
cgtagggacaggtttcaca

SEQ ID NO: 757 - RNA, 19 nt, synthetic construct
  misc_feature 1..19: note = Description of Artificial Sequence: Synthetic oligonucleotide
  source 1..19: mol_type = other RNA
gtagggacaggtttcacaa

SEQ ID NO: 758 - RNA, 19 nt, synthetic construct
  misc_feature 1..19: note = Description of Artificial Sequence: Synthetic oligonucleotide
  source 1..19: mol_type = other RNA
tagggacaggtttcacaac

SEQ ID NO: 759 - RNA, 19 nt, synthetic construct
  misc_feature 1..19: note = Description of Artificial Sequence: Synthetic oligonucleotide
  source 1..19: mol_type = other RNA
agggacaggtttcacaact

SEQ ID NO: 760 - RNA, 19 nt, synthetic construct
  misc_feature 1..19: note = Description of Artificial Sequence: Synthetic oligonucleotide
  source 1..19: mol_type = other RNA
gggacaggtttcacaactt

SEQ ID NO: 761 - RNA, 19 nt, synthetic construct
  misc_feature 1..19: note = Description of Artificial Sequence: Synthetic oligonucleotide
  source 1..19: mol_type = other RNA
ggacaggtttcacaacttc

SEQ ID NO: 762 - RNA, 19 nt, synthetic construct
  misc_feature 1..19: note = Description of Artificial Sequence: Synthetic oligonucleotide
  source 1..19: mol_type = other RNA
gacaggtttcacaacttcc

SEQ ID NO: 763 - RNA, 19 nt, synthetic construct
  misc_feature 1..19: note = Description of Artificial Sequence: Synthetic oligonucleotide
  source 1..19: mol_type = other RNA
acaggtttcacaacttccc

SEQ ID NO: 764 - RNA, 19 nt, synthetic construct
  misc_feature 1..19: note = Description of Artificial Sequence: Synthetic oligonucleotide
  source 1..19: mol_type = other RNA
caggtttcacaacttcccg

SEQ ID NO: 765 - RNA, 19 nt, synthetic construct
  misc_feature 1..19: note = Description of Artificial Sequence: Synthetic oligonucleotide
  source 1..19: mol_type = other RNA
aggtttcacaacttcccgg

SEQ ID NO: 766 - RNA, 19 nt, synthetic construct
  misc_feature 1..19: note = Description of Artificial Sequence: Synthetic oligonucleotide
  source 1..19: mol_type = other RNA
ggtttcacaacttcccgga

SEQ ID NO: 767 - RNA, 19 nt, synthetic construct
  misc_feature 1..19: note = Description of Artificial Sequence: Synthetic oligonucleotide
  source 1..19: mol_type = other RNA
gtttcacaacttcccggat

SEQ ID NO: 768 - RNA, 19 nt, synthetic construct
  misc_feature 1..19: note = Description of Artificial Sequence: Synthetic oligonucleotide
  source 1..19: mol_type = other RNA
tttcacaacttcccggatg

SEQ ID NO: 769 - RNA, 19 nt, synthetic construct
  misc_feature 1..19: note = Description of Artificial Sequence: Synthetic oligonucleotide
  source 1..19: mol_type = other RNA
ttcacaacttcccggatgg

SEQ ID NO: 770 - RNA, 19 nt, synthetic construct
  misc_feature 1..19: note = Description of Artificial Sequence: Synthetic oligonucleotide
  source 1..19: mol_type = other RNA
tcacaacttcccggatggg

SEQ ID NO: 771 - RNA, 19 nt, synthetic construct
  misc_feature 1..19: note = Description of Artificial Sequence: Synthetic oligonucleotide
  source 1..19: mol_type = other RNA
cacaacttcccggatgggg

SEQ ID NO: 772 - RNA, 19 nt, synthetic construct
  misc_feature 1..19: note = Description of Artificial Sequence: Synthetic oligonucleotide
  source 1..19: mol_type = other RNA
acaacttcccggatggggc

SEQ ID NO: 773 - RNA, 19 nt, synthetic construct
  misc_feature 1..19: note = Description of Artificial Sequence: Synthetic oligonucleotide
  source 1..19: mol_type = other RNA
caacttcccggatggggct

SEQ ID NO: 774 - RNA, 19 nt, synthetic construct
  misc_feature 1..19: note = Description of Artificial Sequence: Synthetic oligonucleotide
  source 1..19: mol_type = other RNA
aacttcccggatggggctg

SEQ ID NO: 775 - RNA, 19 nt, synthetic construct
  misc_feature 1..19: note = Description of Artificial Sequence: Synthetic oligonucleotide
  source 1..19: mol_type = other RNA
acttcccggatggggctgt

SEQ ID NO: 776 - RNA, 19 nt, synthetic construct
  misc_feature 1..19: note = Description of Artificial Sequence: Synthetic oligonucleotide
  source 1..19: mol_type = other RNA
cttcccggatggggctgtg

SEQ ID NO: 777 - RNA, 19 nt, synthetic construct
  misc_feature 1..19: note = Description of Artificial Sequence: Synthetic oligonucleotide
  source 1..19: mol_type = other RNA
ttcccggatggggctgtgg

SEQ ID NO: 778 - RNA, 19 nt, synthetic construct
  misc_feature 1..19: note = Description of Artificial Sequence: Synthetic oligonucleotide
  source 1..19: mol_type = other RNA
tcccggatggggctgtggt

SEQ ID NO: 779 - RNA, 19 nt, synthetic construct
  misc_feature 1..19: note = Description of Artificial Sequence: Synthetic oligonucleotide
  source 1..19: mol_type = other RNA
cccggatggggctgtggtg

SEQ ID NO: 780 - RNA, 19 nt, synthetic construct
  misc_feature 1..19: note = Description of Artificial Sequence: Synthetic oligonucleotide
  source 1..19: mol_type = other RNA
ccggatggggctgtggtgg

SEQ ID NO: 781 - RNA, 19 nt, synthetic construct
  misc_feature 1..19: note = Description of Artificial Sequence: Synthetic oligonucleotide
  source 1..19: mol_type = other RNA
cggatggggctgtggtggg

SEQ ID NO: 782 - RNA, 19 nt, synthetic construct
  misc_feature 1..19: note = Description of Artificial Sequence: Synthetic oligonucleotide
  source 1..19: mol_type = other RNA
ggatggggctgtggtgggt

SEQ ID NO: 783 - RNA, 19 nt, synthetic construct
  misc_feature 1..19: note = Description of Artificial Sequence: Synthetic oligonucleotide
  source 1..19: mol_type = other RNA
gatggggctgtggtgggtc

SEQ ID NO: 784 - RNA, 19 nt, synthetic construct
  misc_feature 1..19: note = Description of Artificial Sequence: Synthetic oligonucleotide
  source 1..19: mol_type = other RNA
atggggctgtggtgggtca

SEQ ID NO: 785 - RNA, 19 nt, synthetic construct
  misc_feature 1..19: note = Description of Artificial Sequence: Synthetic oligonucleotide
  source 1..19: mol_type = other RNA
tggggctgtggtgggtcac

SEQ ID NO: 786 - RNA, 19 nt, synthetic construct
  misc_feature 1..19: note = Description of Artificial Sequence: Synthetic oligonucleotide
  source 1..19: mol_type = other RNA
ggggctgtggtgggtcaca

SEQ ID NO: 787 - RNA, 19 nt, synthetic construct
  misc_feature 1..19: note = Description of Artificial Sequence: Synthetic oligonucleotide
  source 1..19: mol_type = other RNA
gggctgtggtgggtcacag

SEQ ID NO: 788 - RNA, 19 nt, synthetic construct
  misc_feature 1..19: note = Description of Artificial Sequence: Synthetic oligonucleotide
  source 1..19: mol_type = other RNA
ggctgtggtgggtcacagt

SEQ ID NO: 789 - RNA, 19 nt, synthetic construct
  misc_feature 1..19: note = Description of Artificial Sequence: Synthetic oligonucleotide
  source 1..19: mol_type = other RNA
gctgtggtgggtcacagtg

SEQ ID NO: 790 - RNA, 19 nt, synthetic construct
  misc_feature 1..19: note = Description of Artificial Sequence: Synthetic oligonucleotide
  source 1..19: mol_type = other RNA
ctgtggtgggtcacagtgc

SEQ ID NO: 791 - RNA, 19 nt, synthetic construct
  misc_feature 1..19: note = Description of Artificial Sequence: Synthetic oligonucleotide
  source 1..19: mol_type = other RNA
tgtggtgggtcacagtgca

SEQ ID NO: 792 - RNA, 19 nt, synthetic construct
  misc_feature 1..19: note = Description of Artificial Sequence: Synthetic oligonucleotide
  source 1..19: mol_type = other RNA
gtggtgggtcacagtgcag

SEQ ID NO: 793 - RNA, 19 nt, synthetic construct
  misc_feature 1..19: note = Description of Artificial Sequence: Synthetic oligonucleotide
  source 1..19: mol_type = other RNA
tggtgggtcacagtgcagc

SEQ ID NO: 794 - RNA, 19 nt, synthetic construct
  misc_feature 1..19: note = Description of Artificial Sequence: Synthetic oligonucleotide
  source 1..19: mol_type = other RNA
ggtgggtcacagtgcagcc

SEQ ID NO: 795 - RNA, 19 nt, synthetic construct
  misc_feature 1..19: note = Description of Artificial Sequence: Synthetic oligonucleotide
  source 1..19: mol_type = other RNA
gtgggtcacagtgcagcct

SEQ ID NO: 796 - RNA, 19 nt, synthetic construct
  misc_feature 1..19: note = Description of Artificial Sequence: Synthetic oligonucleotide
  source 1..19: mol_type = other RNA
tgggtcacagtgcagcctc

SEQ ID NO: 797 - RNA, 19 nt, synthetic construct
  misc_feature 1..19: note = Description of Artificial Sequence: Synthetic oligonucleotide
  source 1..19: mol_type = other RNA
gggtcacagtgcagcctcc

SEQ ID NO: 798 - RNA, 19 nt, synthetic construct
  misc_feature 1..19: note = Description of Artificial Sequence: Synthetic oligonucleotide
  source 1..19: mol_type = other RNA
ggtcacagtgcagcctcca

SEQ ID NO: 799 - RNA, 19 nt, synthetic construct
  misc_feature 1..19: note = Description of Artificial Sequence: Synthetic oligonucleotide
  source 1..19: mol_type = other RNA
gtcacagtgcagcctccag

SEQ ID NO: 800 - RNA, 19 nt, synthetic construct
  misc_feature 1..19: note = Description of Artificial Sequence: Synthetic oligonucleotide
  source 1..19: mol_type = other RNA
tcacagtgcagcctccagc

SEQ ID NO: 801 - RNA, 19 nt, synthetic construct
  misc_feature 1..19: note = Description of Artificial Sequence: Synthetic oligonucleotide
  source 1..19: mol_type = other RNA
cacagtgcagcctccagcc

SEQ ID NO: 802 - RNA, 19 nt, synthetic construct
  misc_feature 1..19: note = Description of Artificial Sequence: Synthetic oligonucleotide
  source 1..19: mol_type = other RNA
acagtgcagcctccagcca

SEQ ID NO: 803 - RNA, 19 nt, synthetic construct
  misc_feature 1..19: note = Description of Artificial Sequence: Synthetic oligonucleotide
  source 1..19: mol_type = other RNA
cagtgcagcctccagccag

SEQ ID NO: 804 - RNA, 19 nt, synthetic construct
  misc_feature 1..19: note = Description of Artificial Sequence: Synthetic oligonucleotide
  source 1..19: mol_type = other RNA
agtgcagcctccagccaga

SEQ ID NO: 805 - RNA, 19 nt, synthetic construct
  misc_feature 1..19: note = Description of Artificial Sequence: Synthetic oligonucleotide
  source 1..19: mol_type = other RNA
gtgcagcctccagccagaa

SEQ ID NO: 806 - RNA, 19 nt, synthetic construct
  misc_feature 1..19: note = Description of Artificial Sequence: Synthetic oligonucleotide
  source 1..19: mol_type = other RNA
tgcagcctccagccagaag

SEQ ID NO: 807 - RNA, 19 nt, synthetic construct
  misc_feature 1..19: note = Description of Artificial Sequence: Synthetic oligonucleotide
  source 1..19: mol_type = other RNA
gcagcctccagccagaagg

SEQ ID NO: 808 - RNA, 19 nt, synthetic construct
  misc_feature 1..19: note = Description of Artificial Sequence: Synthetic oligonucleotide
  source 1..19: mol_type = other RNA
cagcctccagccagaagga

SEQ ID NO: 809 - RNA, 19 nt, synthetic construct
  misc_feature 1..19: note = Description of Artificial Sequence: Synthetic oligonucleotide
  source 1..19: mol_type = other RNA
agcctccagccagaaggat

SEQ ID NO: 810 - RNA, 19 nt, synthetic construct
  misc_feature 1..19: note = Description of Artificial Sequence: Synthetic oligonucleotide
  source 1..19: mol_type = other RNA
gcctccagccagaaggatg

SEQ ID NO: 811 - RNA, 19 nt, synthetic construct
  misc_feature 1..19: note = Description of Artificial Sequence: Synthetic oligonucleotide
  source 1..19: mol_type = other RNA
cctccagccagaaggatgg

SEQ ID NO: 812 - RNA, 19 nt, synthetic construct
  misc_feature 1..19: note = Description of Artificial Sequence: Synthetic oligonucleotide
  source 1..19: mol_type = other RNA
ctccagccagaaggatggg

SEQ ID NO: 813 - RNA, 19 nt, synthetic construct
  misc_feature 1..19: note = Description of Artificial Sequence: Synthetic oligonucleotide
  source 1..19: mol_type = other RNA
tccagccagaaggatgggg

SEQ ID NO: 814 - RNA, 19 nt, synthetic construct
  misc_feature 1..19: note = Description of Artificial Sequence: Synthetic oligonucleotide
  source 1..19: mol_type = other RNA
ccagccagaaggatggggt

SEQ ID NO: 815 - RNA, 19 nt, synthetic construct
  misc_feature 1..19: note = Description of Artificial Sequence: Synthetic oligonucleotide
  source 1..19: mol_type = other RNA
cagccagaaggatggggtg

SEQ ID NO: 816 - RNA, 19 nt, synthetic construct
  misc_feature 1..19: note = Description of Artificial Sequence: Synthetic oligonucleotide
  source 1..19: mol_type = other RNA
agccagaaggatggggtgg

SEQ ID NO: 817 - RNA, 19 nt, synthetic construct
  misc_feature 1..19: note = Description of Artificial Sequence: Synthetic oligonucleotide
  source 1..19: mol_type = other RNA
gccagaaggatggggtggc

SEQ ID NO: 818 - RNA, 19 nt, synthetic construct
  misc_feature 1..19: note = Description of Artificial Sequence: Synthetic oligonucleotide
  source 1..19: mol_type = other RNA
ccagaaggatggggtggct

SEQ ID NO: 819 - RNA, 19 nt, synthetic construct
  misc_feature 1..19: note = Description of Artificial Sequence: Synthetic oligonucleotide
  source 1..19: mol_type = other RNA
cagaaggatggggtggctc

SEQ ID NO: 820 - RNA, 19 nt, synthetic construct
  misc_feature 1..19: note = Description of Artificial Sequence: Synthetic oligonucleotide
  source 1..19: mol_type = other RNA
agaaggatggggtggctcc

SEQ ID NO: 821 - RNA, 19 nt, synthetic construct
  misc_feature 1..19: note = Description of Artificial Sequence: Synthetic oligonucleotide
  source 1..19: mol_type = other RNA
gaaggatggggtggctccc

SEQ ID NO: 822 - RNA, 19 nt, synthetic construct
  misc_feature 1..19: note = Description of Artificial Sequence: Synthetic oligonucleotide
  source 1..19: mol_type = other RNA
aaggatggggtggctccca

SEQ ID NO: 823 - RNA, 19 nt, synthetic construct
  misc_feature 1..19: note = Description of Artificial Sequence: Synthetic oligonucleotide
  source 1..19: mol_type = other RNA
aggatggggtggctcccac

SEQ ID NO: 824 - RNA, 19 nt, synthetic construct
  misc_feature 1..19: note = Description of Artificial Sequence: Synthetic oligonucleotide
  source 1..19: mol_type = other RNA
ggatggggtggctcccact

SEQ ID NO: 825 - RNA, 19 nt, synthetic construct
  misc_feature 1..19: note = Description of Artificial Sequence: Synthetic oligonucleotide
  source 1..19: mol_type = other RNA
gatggggtggctcccactc

SEQ ID NO: 826 - RNA, 19 nt, synthetic construct
  misc_feature 1..19: note = Description of Artificial Sequence: Synthetic oligonucleotide
  source 1..19: mol_type = other RNA
atggggtggctcccactcc

SEQ ID NO: 827 - RNA, 19 nt, synthetic construct
  misc_feature 1..19: note = Description of Artificial Sequence: Synthetic oligonucleotide
  source 1..19: mol_type = other RNA
tggggtggctcccactcct

SEQ ID NO: 828 - RNA, 19 nt, synthetic construct
  misc_feature 1..19: note = Description of Artificial Sequence: Synthetic oligonucleotide
  source 1..19: mol_type = other RNA
ggggtggctcccactcctg

SEQ ID NO: 829 - RNA, 19 nt, synthetic construct
  misc_feature 1..19: note = Description of Artificial Sequence: Synthetic oligonucleotide
  source 1..19: mol_type = other RNA
gggtggctcccactcctgc

SEQ ID NO: 830 - RNA, 19 nt, synthetic construct
  misc_feature 1..19: note = Description of Artificial Sequence: Synthetic oligonucleotide
  source 1..19: mol_type = other RNA
ggtggctcccactcctgct

SEQ ID NO: 831 - RNA, 19 nt, synthetic construct
  misc_feature 1..19: note = Description of Artificial Sequence: Synthetic oligonucleotide
  source 1..19: mol_type = other RNA
gtggctcccactcctgctg

SEQ ID NO: 832 - RNA, 19 nt, synthetic construct
  misc_feature 1..19: note = Description of Artificial Sequence: Synthetic oligonucleotide
  source 1..19: mol_type = other RNA
tggctcccactcctgctgc

SEQ ID NO: 833 - RNA, 19 nt, synthetic construct
  misc_feature 1..19: note = Description of Artificial Sequence: Synthetic oligonucleotide
  source 1..19: mol_type = other RNA
ggctcccactcctgctgct

SEQ ID NO: 834 - RNA, 19 nt, synthetic construct
  misc_feature 1..19: note = Description of Artificial Sequence: Synthetic oligonucleotide
  source 1..19: mol_type = other RNA
gctcccactcctgctgctt

SEQ ID NO: 835 - RNA, 19 nt, synthetic construct
  misc_feature 1..19: note = Description of Artificial Sequence: Synthetic oligonucleotide
  source 1..19: mol_type = other RNA
ctcccactcctgctgcttc

SEQ ID NO: 836 - RNA, 19 nt, synthetic construct
  misc_feature 1..19: note = Description of Artificial Sequence: Synthetic oligonucleotide
  source 1..19: mol_type = other RNA
tcccactcctgctgcttct

SEQ ID NO: 837 - RNA, 19 nt, synthetic construct
  misc_feature 1..19: note = Description of Artificial Sequence: Synthetic oligonucleotide
  source 1..19: mol_type = other RNA
cccactcctgctgcttctg

SEQ ID NO: 838 - RNA, 19 nt, synthetic construct
  misc_feature 1..19: note = Description of Artificial Sequence: Synthetic oligonucleotide
  source 1..19: mol_type = other RNA
ccactcctgctgcttctga

SEQ ID NO: 839 - RNA, 19 nt, synthetic construct
  misc_feature 1..19: note = Description of Artificial Sequence: Synthetic oligonucleotide
  source 1..19: mol_type = other RNA
cactcctgctgcttctgac

SEQ ID NO: 840 - RNA, 19 nt, synthetic construct
  misc_feature 1..19: note = Description of Artificial Sequence: Synthetic oligonucleotide
  source 1..19: mol_type = other RNA
actcctgctgcttctgact

SEQ ID NO: 841 - RNA, 19 nt, synthetic construct
  misc_feature 1..19: note = Description of Artificial Sequence: Synthetic oligonucleotide
  source 1..19: mol_type = other RNA
ctcctgctgcttctgactc

SEQ ID NO: 842 - RNA, 19 nt, synthetic construct
  misc_feature 1..19: note = Description of Artificial Sequence: Synthetic oligonucleotide
  source 1..19: mol_type = other RNA
tcctgctgcttctgactca

SEQ ID NO: 843 - RNA, 19 nt, synthetic construct
  misc_feature 1..19: note = Description of Artificial Sequence: Synthetic oligonucleotide
  source 1..19: mol_type = other RNA
cctgctgcttctgactcaa

SEQ ID NO: 844 - RNA, 19 nt, synthetic construct
  misc_feature 1..19: note = Description of Artificial Sequence: Synthetic oligonucleotide
  source 1..19: mol_type = other RNA
ctgctgcttctgactcaat

SEQ ID NO: 845 - RNA, 19 nt, synthetic construct
  misc_feature 1..19: note = Description of Artificial Sequence: Synthetic oligonucleotide
  source 1..19: mol_type = other RNA
tgctgcttctgactcaatg

SEQ ID NO: 846 - RNA, 19 nt, synthetic construct
  misc_feature 1..19: note = Description of Artificial Sequence: Synthetic oligonucleotide
  source 1..19: mol_type = other RNA
gctgcttctgactcaatgc

SEQ ID NO: 847 - RNA, 19 nt, synthetic construct
  misc_feature 1..19: note = Description of Artificial Sequence: Synthetic oligonucleotide
  source 1..19: mol_type = other RNA
ctgcttctgactcaatgct

SEQ ID NO: 848 - RNA, 19 nt, synthetic construct
  misc_feature 1..19: note = Description of Artificial Sequence: Synthetic oligonucleotide
  source 1..19: mol_type = other RNA
tgcttctgactcaatgctt

SEQ ID NO: 849 - RNA, 19 nt, synthetic construct
  misc_feature 1..19: note = Description of Artificial Sequence: Synthetic oligonucleotide
  source 1..19: mol_type = other RNA
gcttctgactcaatgctta

SEQ ID NO: 850 - RNA, 19 nt, synthetic construct
  misc_feature 1..19: note = Description of Artificial Sequence: Synthetic oligonucleotide
  source 1..19: mol_type = other RNA
cttctgactcaatgcttag

SEQ ID NO: 851 - RNA, 19 nt, synthetic construct
  misc_feature 1..19: note = Description of Artificial Sequence: Synthetic oligonucleotide
  source 1..19: mol_type = other RNA
ttctgactcaatgcttagg

SEQ ID NO: 852 - RNA, 19 nt, synthetic construct
  misc_feature 1..19: note = Description of Artificial Sequence: Synthetic oligonucleotide
  source 1..19: mol_type = other RNA
tctgactcaatgcttaggg

SEQ ID NO: 853 - RNA, 19 nt, synthetic construct
  misc_feature 1..19: note = Description of Artificial Sequence: Synthetic oligonucleotide
  source 1..19: mol_type = other RNA
ctgactcaatgcttagggg

SEQ ID NO: 854 - RNA, 19 nt, synthetic construct
  misc_feature 1..19: note = Description of Artificial Sequence: Synthetic oligonucleotide
  source 1..19: mol_type = other RNA
tgactcaatgcttaggggt

SEQ ID NO: 855 - RNA, 19 nt, synthetic construct
  misc_feature 1..19: note = Description of Artificial Sequence: Synthetic oligonucleotide
  source 1..19: mol_type = other RNA
gactcaatgcttaggggtc

SEQ ID NO: 856 - RNA, 19 nt, synthetic construct
  misc_feature 1..19: note = Description of Artificial Sequence: Synthetic oligonucleotide
  source 1..19: mol_type = other RNA
actcaatgcttaggggtcc

SEQ ID NO: 857 - RNA, 19 nt, synthetic construct
  misc_feature 1..19: note = Description of Artificial Sequence: Synthetic oligonucleotide
  source 1..19: mol_type = other RNA
ctcaatgcttaggggtccc

SEQ ID NO: 858 - RNA, 19 nt, synthetic construct
  misc_feature 1..19: note = Description of Artificial Sequence: Synthetic oligonucleotide
  source 1..19: mol_type = other RNA
tcaatgcttaggggtccct

SEQ ID NO: 859 - RNA, 19 nt, synthetic construct
  misc_feature 1..19: note = Description of Artificial Sequence: Synthetic oligonucleotide
  source 1..19: mol_type = other RNA
caatgcttaggggtccctg

SEQ ID NO: 860 - RNA, 19 nt, synthetic construct
  misc_feature 1..19: note = Description of Artificial Sequence: Synthetic oligonucleotide
  source 1..19: mol_type = other RNA
aatgcttaggggtccctgg

SEQ ID NO: 861 - RNA, 19 nt, synthetic construct
  misc_feature 1..19: note = Description of Artificial Sequence: Synthetic oligonucleotide
  source 1..19: mol_type = other RNA
atgcttaggggtccctggg

SEQ ID NO: 862 - RNA, 19 nt, synthetic construct
  misc_feature 1..19: note = Description of Artificial Sequence: Synthetic oligonucleotide
  source 1..19: mol_type = other RNA
tgcttaggggtccctgggc

SEQ ID NO: 863 - RNA, 19 nt, synthetic construct
  misc_feature 1..19: note = Description of Artificial Sequence: Synthetic oligonucleotide
  source 1..19: mol_type = other RNA
gcttaggggtccctgggca

SEQ ID NO: 864 - RNA, 19 nt, synthetic construct
  misc_feature 1..19: note = Description of Artificial Sequence: Synthetic oligonucleotide
  source 1..19: mol_type = other RNA
cttaggggtccctgggcag

SEQ ID NO: 865 - RNA, 19 nt, synthetic construct
  misc_feature 1..19: note = Description of Artificial Sequence: Synthetic oligonucleotide
  source 1..19: mol_type = other RNA
ttaggggtccctgggcagc

SEQ ID NO: 866 - RNA, 19 nt, synthetic construct
  misc_feature 1..19: note = Description of Artificial Sequence: Synthetic oligonucleotide
  source 1..19: mol_type = other RNA
taggggtccctgggcagcg

SEQ ID NO: 867 - RNA, 19 nt, synthetic construct
  misc_feature 1..19: note = Description of Artificial Sequence: Synthetic oligonucleotide
  source 1..19: mol_type = other RNA
aggggtccctgggcagcgc

SEQ ID NO: 868 - RNA, 19 nt, synthetic construct
  misc_feature 1..19: note = Description of Artificial Sequence: Synthetic oligonucleotide
  source 1..19: mol_type = other RNA
ggggtccctgggcagcgct

SEQ ID NO: 869 - RNA, 19 nt, synthetic construct
  misc_feature 1..19: note = Description of Artificial Sequence: Synthetic oligonucleotide
  source 1..19: mol_type = other RNA
gggtccctgggcagcgctc

SEQ ID NO: 870 - RNA, 19 nt, synthetic construct
  misc_feature 1..19: note = Description of Artificial Sequence: Synthetic oligonucleotide
  source 1..19: mol_type = other RNA
ggtccctgggcagcgctcg

SEQ ID NO: 871 - RNA, 19 nt, synthetic construct
  misc_feature 1..19: note = Description of Artificial Sequence: Synthetic oligonucleotide
  source 1..19: mol_type = other RNA
gtccctgggcagcgctcgc

SEQ ID NO: 872 - RNA, 19 nt, synthetic construct
  misc_feature 1..19: note = Description of Artificial Sequence: Synthetic oligonucleotide
  source 1..19: mol_type = other RNA
tccctgggcagcgctcgcc

SEQ ID NO: 873 - RNA, 19 nt, synthetic construct
  misc_feature 1..19: note = Description of Artificial Sequence: Synthetic oligonucleotide
  source 1..19: mol_type = other RNA
ccctgggcagcgctcgcca

SEQ ID NO: 874 - RNA, 19 nt, synthetic construct
  misc_feature 1..19: note = Description of Artificial Sequence: Synthetic oligonucleotide
  source 1..19: mol_type = other RNA
cctgggcagcgctcgccat

SEQ ID NO: 875 - RNA, 19 nt, synthetic construct
  misc_feature 1..19: note = Description of Artificial Sequence: Synthetic oligonucleotide
  source 1..19: mol_type = other RNA
ctgggcagcgctcgccatt

SEQ ID NO: 876 - RNA, 19 nt, synthetic construct
  misc_feature 1..19: note = Description of Artificial Sequence: Synthetic oligonucleotide
  source 1..19: mol_type = other RNA
tgggcagcgctcgccattg

SEQ ID NO: 877 - RNA, 19 nt, synthetic construct
  misc_feature 1..19: note = Description of Artificial Sequence: Synthetic oligonucleotide
  source 1..19: mol_type = other RNA
gggcagcgctcgccattga

SEQ ID NO: 878 - RNA, 19 nt, synthetic construct
  misc_feature 1..19: note = Description of Artificial Sequence: Synthetic oligonucleotide
  source 1..19: mol_type = other RNA
ggcagcgctcgccattgaa

SEQ ID NO: 879 - RNA, 19 nt, synthetic construct
  misc_feature 1..19: note = Description of Artificial Sequence: Synthetic oligonucleotide
  source 1..19: mol_type = other RNA
gcagcgctcgccattgaat

SEQ ID NO: 880 - RNA, 19 nt, synthetic construct
  misc_feature 1..19: note = Description of Artificial Sequence: Synthetic oligonucleotide
  source 1..19: mol_type = other RNA
cagcgctcgccattgaatg

SEQ ID NO: 881 - RNA, 19 nt, synthetic construct
  misc_feature 1..19: note = Description of Artificial Sequence: Synthetic oligonucleotide
  source 1..19: mol_type = other RNA
agcgctcgccattgaatga

SEQ ID NO: 882 - RNA, 19 nt, synthetic construct
  misc_feature 1..19: note = Description of Artificial Sequence: Synthetic oligonucleotide
  source 1..19: mol_type = other RNA
gcgctcgccattgaatgac

SEQ ID NO: 883 - RNA, 19 nt, synthetic construct
  misc_feature 1..19: note = Description of Artificial Sequence: Synthetic oligonucleotide
  source 1..19: mol_type = other RNA
cgctcgccattgaatgact

SEQ ID NO: 884 - RNA, 19 nt, synthetic construct
  misc_feature 1..19: note = Description of Artificial Sequence: Synthetic oligonucleotide
  source 1..19: mol_type = other RNA
gctcgccattgaatgactt

SEQ ID NO: 885 - RNA, 19 nt, synthetic construct
  misc_feature 1..19: note = Description of Artificial Sequence: Synthetic oligonucleotide
  source 1..19: mol_type = other RNA
ctcgccattgaatgacttc

SEQ ID NO: 886 - RNA, 19 nt, synthetic construct
  misc_feature 1..19: note = Description of Artificial Sequence: Synthetic oligonucleotide
  source 1..19: mol_type = other RNA
tcgccattgaatgacttcc

SEQ ID NO: 887 - RNA, 19 nt, synthetic construct
  misc_feature 1..19: note = Description of Artificial Sequence: Synthetic oligonucleotide
  source 1..19: mol_type = other RNA
cgccattgaatgacttcca

SEQ ID NO: 888 - RNA, 19 nt, synthetic construct
  misc_feature 1..19: note = Description of Artificial Sequence: Synthetic oligonucleotide
  source 1..19: mol_type = other RNA
gccattgaatgacttccaa

SEQ ID NO: 889 - RNA, 19 nt, synthetic construct
  misc_feature 1..19: note = Description of Artificial Sequence: Synthetic oligonucleotide
  source 1..19: mol_type = other RNA
ccattgaatgacttccaag

SEQ ID NO: 890 - RNA, 19 nt, synthetic construct
  misc_feature 1..19: note = Description of Artificial Sequence: Synthetic oligonucleotide
  source 1..19: mol_type = other RNA
cattgaatgacttccaagt

SEQ ID NO: 891 - RNA, 19 nt, synthetic construct
  misc_feature 1..19: note = Description of Artificial Sequence: Synthetic oligonucleotide
  source 1..19: mol_type = other RNA
attgaatgacttccaagtg

SEQ ID NO: 892 - RNA, 19 nt, synthetic construct
  misc_feature 1..19: note = Description of Artificial Sequence: Synthetic oligonucleotide
  source 1..19: mol_type = other RNA
ttgaatgacttccaagtgc

SEQ ID NO: 893 - RNA, 19 nt, synthetic construct
  misc_feature 1..19: note = Description of Artificial Sequence: Synthetic oligonucleotide
  source 1..19: mol_type = other RNA
tgaatgacttccaagtgct

SEQ ID NO: 894 - RNA, 19 nt, synthetic construct
  misc_feature 1..19: note = Description of Artificial Sequence: Synthetic oligonucleotide
  source 1..19: mol_type = other RNA
gaatgacttccaagtgctc

SEQ ID NO: 895 - RNA, 19 nt, synthetic construct
  misc_feature 1..19: note = Description of Artificial Sequence: Synthetic oligonucleotide
  source 1..19: mol_type = other RNA
aatgacttccaagtgctcc

SEQ ID NO: 896 - RNA, 19 nt, synthetic construct
  misc_feature 1..19: note = Description of Artificial Sequence: Synthetic oligonucleotide
  source 1..19: mol_type = other RNA
atgacttccaagtgctccg

SEQ ID NO: 897 - RNA, 19 nt, synthetic construct
  misc_feature 1..19: note = Description of Artificial Sequence: Synthetic oligonucleotide
  source 1..19: mol_type = other RNA
tgacttccaagtgctccgg

SEQ ID NO: 898 - RNA, 19 nt, synthetic construct
  misc_feature 1..19: note = Description of Artificial Sequence: Synthetic oligonucleotide
  source 1..19: mol_type = other RNA
gacttccaagtgctccggg

SEQ ID NO: 899 - RNA, 19 nt, synthetic construct
  misc_feature 1..19: note = Description of Artificial Sequence: Synthetic oligonucleotide
  source 1..19: mol_type = other RNA
acttccaagtgctccgggg

SEQ ID NO: 900 - RNA, 19 nt, synthetic construct
  misc_feature 1..19: note = Description of Artificial Sequence: Synthetic oligonucleotide
  source 1..19: mol_type = other RNA
cttccaagtgctccggggc

SEQ ID NO: 901 - RNA, 19 nt, synthetic construct
  misc_feature 1..19: note = Description of Artificial Sequence: Synthetic oligonucleotide
  source 1..19: mol_type = other RNA
ttccaagtgctccggggca

SEQ ID NO: 902 - RNA, 19 nt, synthetic construct
  misc_feature 1..19: note = Description of Artificial Sequence: Synthetic oligonucleotide
  source 1..19: mol_type = other RNA
tccaagtgctccggggcac

SEQ ID NO: 903 - RNA, 19 nt, synthetic construct
  misc_feature 1..19: note = Description of Artificial Sequence: Synthetic oligonucleotide
  source 1..19: mol_type = other RNA
ccaagtgctccggggcaca

SEQ ID NO: 904 - RNA, 19 nt, synthetic construct
  misc_feature 1..19: note = Description of Artificial Sequence: Synthetic oligonucleotide
  source 1..19: mol_type = other RNA
caagtgctccggggcacag

SEQ ID NO: 905 - RNA, 19 nt, synthetic construct
  misc_feature 1..19: note = Description of Artificial Sequence: Synthetic oligonucleotide
  source 1..19: mol_type = other RNA
aagtgctccggggcacaga

SEQ ID NO: 906 - RNA, 19 nt, synthetic construct
  misc_feature 1..19: note = Description of Artificial Sequence: Synthetic oligonucleotide
  source 1..19: mol_type = other RNA
agtgctccggggcacagag

SEQ ID NO: 907 - RNA, 19 nt, synthetic construct
  misc_feature 1..19: note = Description of Artificial Sequence: Synthetic oligonucleotide
  source 1..19: mol_type = other RNA
gtgctccggggcacagagc

SEQ ID NO: 908 - RNA, 19 nt, synthetic construct
  misc_feature 1..19: note = Description of Artificial Sequence: Synthetic oligonucleotide
  source 1..19: mol_type = other RNA
tgctccggggcacagagct

SEQ ID NO: 909 - RNA, 19 nt, synthetic construct
  misc_feature 1..19: note = Description of Artificial Sequence: Synthetic oligonucleotide
  source 1..19: mol_type = other RNA
gctccggggcacagagcta

SEQ ID NO: 910 - RNA, 19 nt, synthetic construct
  misc_feature 1..19: note = Description of Artificial Sequence: Synthetic oligonucleotide
  source 1..19: mol_type = other RNA
ctccggggcacagagctac

SEQ ID NO: 911 - RNA, 19 nt, synthetic construct
  misc_feature 1..19: note = Description of Artificial Sequence: Synthetic oligonucleotide
  source 1..19: mol_type = other RNA
tccggggcacagagctaca

SEQ ID NO: 912 - RNA, 19 nt, synthetic construct
  misc_feature 1..19: note = Description of Artificial Sequence: Synthetic oligonucleotide
  source 1..19: mol_type = other RNA
ccggggcacagagctacag

SEQ ID NO: 913 - RNA, 19 nt, synthetic construct
  misc_feature 1..19: note = Description of Artificial Sequence: Synthetic oligonucleotide
  source 1..19: mol_type = other RNA
cggggcacagagctacagc

SEQ ID NO: 914 - RNA, 19 nt, synthetic construct
  misc_feature 1..19: note = Description of Artificial Sequence: Synthetic oligonucleotide
  source 1..19: mol_type = other RNA
ggggcacagagctacagca

SEQ ID NO: 915 - RNA, 19 nt, synthetic construct
  misc_feature 1..19: note = Description of Artificial Sequence: Synthetic oligonucleotide
  source 1..19: mol_type = other RNA
gggcacagagctacagcac

SEQ ID NO: 916 - RNA, 19 nt, synthetic construct
  misc_feature 1..19: note = Description of Artificial Sequence: Synthetic oligonucleotide
  source 1..19: mol_type = other RNA
ggcacagagctacagcacc

SEQ ID NO: 917 - RNA, 19 nt, synthetic construct
  misc_feature 1..19: note = Description of Artificial Sequence: Synthetic oligonucleotide
  source 1..19: mol_type = other RNA
gcacagagctacagcacct

SEQ ID NO: 918 - RNA, 19 nt, synthetic construct
  misc_feature 1..19: note = Description of Artificial Sequence: Synthetic oligonucleotide
  source 1..19: mol_type = other RNA
cacagagctacagcacctg

SEQ ID NO: 919 - RNA, 19 nt, synthetic construct
  misc_feature 1..19: note = Description of Artificial Sequence: Synthetic oligonucleotide
  source 1..19: mol_type = other RNA
acagagctacagcacctgc

SEQ ID NO: 920 - RNA, 19 nt, synthetic construct
  misc_feature 1..19: note = Description of Artificial Sequence: Synthetic oligonucleotide
  source 1..19: mol_type = other RNA
cagagctacagcacctgct

SEQ ID NO: 921 - RNA, 19 nt, synthetic construct
  misc_feature 1..19: note = Description of Artificial Sequence: Synthetic oligonucleotide
  source 1..19: mol_type = other RNA
agagctacagcacctgcta

SEQ ID NO: 922 - RNA, 19 nt, synthetic construct
  misc_feature 1..19: note = Description of Artificial Sequence: Synthetic oligonucleotide
  source 1..19: mol_type = other RNA
gagctacagcacctgctac

SEQ ID NO: 923 - RNA, 19 nt, synthetic construct
  misc_feature 1..19: note = Description of Artificial Sequence: Synthetic oligonucleotide
  source 1..19: mol_type = other RNA
agctacagcacctgctaca

SEQ ID NO: 924 - RNA, 19 nt, synthetic construct
  misc_feature 1..19: note = Description of Artificial Sequence: Synthetic oligonucleotide
  source 1..19: mol_type = other RNA
gctacagcacctgctacat

SEQ ID NO: 925 - RNA, 19 nt, synthetic construct
  misc_feature 1..19: note = Description of Artificial Sequence: Synthetic oligonucleotide
  source 1..19: mol_type = other RNA
ctacagcacctgctacatg

SEQ ID NO: 926 - RNA, 19 nt, synthetic construct
  misc_feature 1..19: note = Description of Artificial Sequence: Synthetic oligonucleotide
  source 1..19: mol_type = other RNA
tacagcacctgctacatgc

SEQ ID NO: 927 - RNA, 19 nt, synthetic construct
  misc_feature 1..19: note = Description of Artificial Sequence: Synthetic oligonucleotide
  source 1..19: mol_type = other RNA
acagcacctgctacatgcg

SEQ ID NO: 928 - RNA, 19 nt, synthetic construct
  misc_feature 1..19: note = Description of Artificial Sequence: Synthetic oligonucleotide
  source 1..19: mol_type = other RNA
cagcacctgctacatgcgg

SEQ ID NO: 929 - RNA, 19 nt, synthetic construct
  misc_feature 1..19: note = Description of Artificial Sequence: Synthetic oligonucleotide
  source 1..19: mol_type = other RNA
agcacctgctacatgcggt

SEQ ID NO: 930 - RNA, 19 nt, synthetic construct
  misc_feature 1..19: note = Description of Artificial Sequence: Synthetic oligonucleotide
  source 1..19: mol_type = other RNA
gcacctgctacatgcggtg

SEQ ID NO: 931 - RNA, 19 nt, synthetic construct
  misc_feature 1..19: note = Description of Artificial Sequence: Synthetic oligonucleotide
  source 1..19: mol_type = other RNA
cacctgctacatgcggtgg

SEQ ID NO: 932 - RNA, 19 nt, synthetic construct
  misc_feature 1..19: note = Description of Artificial Sequence: Synthetic oligonucleotide
  source 1..19: mol_type = other RNA
acctgctacatgcggtggt

SEQ ID NO: 933 - RNA, 19 nt, synthetic construct
  misc_feature 1..19: note = Description of Artificial Sequence: Synthetic oligonucleotide
  source 1..19: mol_type = other RNA
cctgctacatgcggtggtg

SEQ ID NO: 934 - RNA, 19 nt, synthetic construct
  misc_feature 1..19: note = Description of Artificial Sequence: Synthetic oligonucleotide
  source 1..19: mol_type = other RNA
ctgctacatgcggtggtgc

SEQ ID NO: 935 - RNA, 19 nt, synthetic construct
  misc_feature 1..19: note = Description of Artificial Sequence: Synthetic oligonucleotide
  source 1..19: mol_type = other RNA
tgctacatgcggtggtgcc

SEQ ID NO: 936 - RNA, 19 nt, synthetic construct
  misc_feature 1..19: note = Description of Artificial Sequence: Synthetic oligonucleotide
  source 1..19: mol_type = other RNA
gctacatgcggtggtgccc

SEQ ID NO: 937 - RNA, 19 nt, synthetic construct
  misc_feature 1..19: note = Description of Artificial Sequence: Synthetic oligonucleotide
  source 1..19: mol_type = other RNA
ctacatgcggtggtgcccg

SEQ ID NO: 938 - RNA, 19 nt, synthetic construct
  misc_feature 1..19: note = Description of Artificial Sequence: Synthetic oligonucleotide
  source 1..19: mol_type = other RNA
tacatgcggtggtgcccgg

SEQ ID NO: 939 - RNA, 19 nt, synthetic construct
  misc_feature 1..19: note = Description of Artificial Sequence: Synthetic oligonucleotide
  source 1..19: mol_type = other RNA
acatgcggtggtgcccggg

SEQ ID NO: 940 - RNA, 19 nt, synthetic construct
  misc_feature 1..19: note = Description of Artificial Sequence: Synthetic oligonucleotide
  source 1..19: mol_type = other RNA
catgcggtggtgcccgggc

SEQ ID NO: 941 - RNA, 19 nt, synthetic construct
  misc_feature 1..19: note = Description of Artificial Sequence: Synthetic oligonucleotide
  source 1..19: mol_type = other RNA
atgcggtggtgcccgggcc

SEQ ID NO: 942 - RNA, 19 nt, synthetic construct
  misc_feature 1..19: note = Description of Artificial Sequence: Synthetic oligonucleotide
  source 1..19: mol_type = other RNA
tgcggtggtgcccgggcct

SEQ ID NO: 943 - RNA, 19 nt, synthetic construct
  misc_feature 1..19: note = Description of Artificial Sequence: Synthetic oligonucleotide
  source 1..19: mol_type = other RNA
gcggtggtgcccgggcctt

SEQ ID NO: 944 - RNA, 19 nt, synthetic construct
  misc_feature 1..19: note = Description of Artificial Sequence: Synthetic oligonucleotide
  source 1..19: mol_type = other RNA
cggtggtgcccgggccttg

SEQ ID NO: 945 - RNA, 19 nt, synthetic construct
  misc_feature 1..19: note = Description of Artificial Sequence: Synthetic oligonucleotide
  source 1..19: mol_type = other RNA
ggtggtgcccgggccttgg

SEQ ID NO: 946 - RNA, 19 nt, synthetic construct
  misc_feature 1..19: note = Description of Artificial Sequence: Synthetic oligonucleotide
  source 1..19: mol_type = other RNA
gtggtgcccgggccttggc

SEQ ID NO: 947 - RNA, 19 nt, synthetic construct
  misc_feature 1..19: note = Description of Artificial Sequence: Synthetic oligonucleotide
  source 1..19: mol_type = other RNA
tggtgcccgggccttggca

SEQ ID NO: 948 - RNA, 19 nt, synthetic construct
  misc_feature 1..19: note = Description of Artificial Sequence: Synthetic oligonucleotide
  source 1..19: mol_type = other RNA
ggtgcccgggccttggcag

SEQ ID NO: 949 - RNA, 19 nt, synthetic construct
  misc_feature 1..19: note = Description of Artificial Sequence: Synthetic oligonucleotide
  source 1..19: mol_type = other RNA
gtgcccgggccttggcagg

SEQ ID NO: 950 - RNA, 19 nt, synthetic construct
  misc_feature 1..19: note = Description of Artificial Sequence: Synthetic oligonucleotide
  source 1..19: mol_type = other RNA
tgcccgggccttggcagga

SEQ ID NO: 951 - RNA, 19 nt, synthetic construct
  misc_feature 1..19: note = Description of Artificial Sequence: Synthetic oligonucleotide
  source 1..19: mol_type = other RNA
gcccgggccttggcaggag

SEQ ID NO: 952 - RNA, 19 nt, synthetic construct
  misc_feature 1..19: note = Description of Artificial Sequence: Synthetic oligonucleotide
  source 1..19: mol_type = other RNA
cccgggccttggcaggagg

SEQ ID NO: 953 - RNA, 19 nt, synthetic construct
  misc_feature 1..19: note = Description of Artificial Sequence: Synthetic oligonucleotide
  source 1..19: mol_type = other RNA
ccgggccttggcaggagga

SEQ ID NO: 954 - RNA, 19 nt, synthetic construct
  misc_feature 1..19: note = Description of Artificial Sequence: Synthetic oligonucleotide
  source 1..19: mol_type = other RNA
cgggccttggcaggaggat

SEQ ID NO: 955 - RNA, 19 nt, synthetic construct
  misc_feature 1..19: note = Description of Artificial Sequence: Synthetic oligonucleotide
  source 1..19: mol_type = other RNA
gggccttggcaggaggatg

SEQ ID NO: 956 - RNA, 19 nt, synthetic construct
  misc_feature 1..19: note = Description of Artificial Sequence: Synthetic oligonucleotide
  source 1..19: mol_type = other RNA
ggccttggcaggaggatgt

SEQ ID NO: 957 - RNA, 19 nt, synthetic construct
  misc_feature 1..19: note = Description of Artificial Sequence: Synthetic oligonucleotide
  source 1..19: mol_type = other RNA
gccttggcaggaggatgtg

SEQ ID NO: 958 - RNA, 19 nt, synthetic construct
  misc_feature 1..19: note = Description of Artificial Sequence: Synthetic oligonucleotide
  source 1..19: mol_type = other RNA
ccttggcaggaggatgtgg

SEQ ID NO: 959 - RNA, 19 nt, synthetic construct
  misc_feature 1..19: note = Description of Artificial Sequence: Synthetic oligonucleotide
  source 1..19: mol_type = other RNA
cttggcaggaggatgtggc

SEQ ID NO: 960 - RNA, 19 nt, synthetic construct
  misc_feature 1..19: note = Description of Artificial Sequence: Synthetic oligonucleotide
  source 1..19: mol_type = other RNA
ttggcaggaggatgtggca

SEQ ID NO: 961 - RNA, 19 nt, synthetic construct
  misc_feature 1..19: note = Description of Artificial Sequence: Synthetic oligonucleotide
  source 1..19: mol_type = other RNA
tggcaggaggatgtggcag

SEQ ID NO: 962 - RNA, 19 nt, synthetic construct
  misc_feature 1..19: note = Description of Artificial Sequence: Synthetic oligonucleotide
  source 1..19: mol_type = other RNA
ggcaggaggatgtggcaga

SEQ ID NO: 963 - RNA, 19 nt, synthetic construct
  misc_feature 1..19: note = Description of Artificial Sequence: Synthetic oligonucleotide
  source 1..19: mol_type = other RNA
gcaggaggatgtggcagat

SEQ ID NO: 964 - RNA, 19 nt, synthetic construct
  misc_feature 1..19: note = Description of Artificial Sequence: Synthetic oligonucleotide
  source 1..19: mol_type = other RNA
caggaggatgtggcagatg

SEQ ID NO: 965 - RNA, 19 nt, synthetic construct
  misc_feature 1..19: note = Description of Artificial Sequence: Synthetic oligonucleotide
  source 1..19: mol_type = other RNA
aggaggatgtggcagatgc

SEQ ID NO: 966 - RNA, 19 nt, synthetic construct
  misc_feature 1..19: note = Description of Artificial Sequence: Synthetic oligonucleotide
  source 1..19: mol_type = other RNA
ggaggatgtggcagatgct

SEQ ID NO: 967 - RNA, 19 nt, synthetic construct
  misc_feature 1..19: note = Description of Artificial Sequence: Synthetic oligonucleotide
  source 1..19: mol_type = other RNA
gaggatgtggcagatgctg

SEQ ID NO: 968 - RNA, 19 nt, synthetic construct
  misc_feature 1..19: note = Description of Artificial Sequence: Synthetic oligonucleotide
  source 1..19: mol_type = other RNA
aggatgtggcagatgctga

SEQ ID NO: 969 - RNA, 19 nt, synthetic construct
  misc_feature 1..19: note = Description of Artificial Sequence: Synthetic oligonucleotide
  source 1..19: mol_type = other RNA
ggatgtggcagatgctgaa

SEQ ID NO: 970 - RNA, 19 nt, synthetic construct
  misc_feature 1..19: note = Description of Artificial Sequence: Synthetic oligonucleotide
  source 1..19: mol_type = other RNA
gatgtggcagatgctgaag

SEQ ID NO: 971 - RNA, 19 nt, synthetic construct
  misc_feature 1..19: note = Description of Artificial Sequence: Synthetic oligonucleotide
  source 1..19: mol_type = other RNA
atgtggcagatgctgaaga

SEQ ID NO: 972 - RNA, 19 nt, synthetic construct
  misc_feature 1..19: note = Description of Artificial Sequence: Synthetic oligonucleotide
  source 1..19: mol_type = other RNA
tgtggcagatgctgaagag

SEQ ID NO: 973 - RNA, 19 nt, synthetic construct
  misc_feature 1..19: note = Description of Artificial Sequence: Synthetic oligonucleotide
  source 1..19: mol_type = other RNA
gtggcagatgctgaagagt

SEQ ID NO: 974 - RNA, 19 nt, synthetic construct
  misc_feature 1..19: note = Description of Artificial Sequence: Synthetic oligonucleotide
  source 1..19: mol_type = other RNA
tggcagatgctgaagagtg

SEQ ID NO: 975 - RNA, 19 nt, synthetic construct
  misc_feature 1..19: note = Description of Artificial Sequence: Synthetic oligonucleotide
  source 1..19: mol_type = other RNA
ggcagatgctgaagagtgt

SEQ ID NO: 976 - RNA, 19 nt, synthetic construct
  misc_feature 1..19: note = Description of Artificial Sequence: Synthetic oligonucleotide
  source 1..19: mol_type = other RNA
gcagatgctgaagagtgtg

SEQ ID NO: 977 - RNA, 19 nt, synthetic construct
  misc_feature 1..19: note = Description of Artificial Sequence: Synthetic oligonucleotide
  source 1..19: mol_type = other RNA
cagatgctgaagagtgtgc

SEQ ID NO: 978 - RNA, 19 nt, synthetic construct
  misc_feature 1..19: note = Description of Artificial Sequence: Synthetic oligonucleotide
  source 1..19: mol_type = other RNA
agatgctgaagagtgtgct

SEQ ID NO: 979 - RNA, 19 nt, synthetic construct
  misc_feature 1..19: note = Description of Artificial Sequence: Synthetic oligonucleotide
  source 1..19: mol_type = other RNA
gatgctgaagagtgtgctg

SEQ ID NO: 980 - RNA, 19 nt, synthetic construct
  misc_feature 1..19: note = Description of Artificial Sequence: Synthetic oligonucleotide
  source 1..19: mol_type = other RNA
atgctgaagagtgtgctgg

SEQ ID NO: 981 - RNA, 19 nt, synthetic construct
  misc_feature 1..19: note = Description of Artificial Sequence: Synthetic oligonucleotide
  source 1..19: mol_type = other RNA
tgctgaagagtgtgctggt

SEQ ID NO: 982 - RNA, 19 nt, synthetic construct
  misc_feature 1..19: note = Description of Artificial Sequence: Synthetic oligonucleotide
  source 1..19: mol_type = other RNA
gctgaagagtgtgctggtc

SEQ ID NO: 983 - RNA, 19 nt, synthetic construct
  misc_feature 1..19: note = Description of Artificial Sequence: Synthetic oligonucleotide
  source 1..19: mol_type = other RNA
ctgaagagtgtgctggtcg

SEQ ID NO: 984 - RNA, 19 nt, synthetic construct
  misc_feature 1..19: note = Description of Artificial Sequence: Synthetic oligonucleotide
  source 1..19: mol_type = other RNA
tgaagagtgtgctggtcgc

SEQ ID NO: 985 - RNA, 19 nt, synthetic construct
  misc_feature 1..19: note = Description of Artificial Sequence: Synthetic oligonucleotide
  source 1..19: mol_type = other RNA
gaagagtgtgctggtcgct

SEQ ID NO: 986 - RNA, 19 nt, synthetic construct
  misc_feature 1..19: note = Description of Artificial Sequence: Synthetic oligonucleotide
  source 1..19: mol_type = other RNA
aagagtgtgctggtcgctg

SEQ ID NO: 987 - RNA, 19 nt, synthetic construct
  misc_feature 1..19: note = Description of Artificial Sequence: Synthetic oligonucleotide
  source 1..19: mol_type = other RNA
agagtgtgctggtcgctgt

SEQ ID NO: 988 - RNA, 19 nt, synthetic construct
  misc_feature 1..19: note = Description of Artificial Sequence: Synthetic oligonucleotide
  source 1..19: mol_type = other RNA
gagtgtgctggtcgctgtg

SEQ ID NO: 989 - RNA, 19 nt, synthetic construct
  misc_feature 1..19: note = Description of Artificial Sequence: Synthetic oligonucleotide
  source 1..19: mol_type = other RNA
agtgtgctggtcgctgtgg

SEQ ID NO: 990 - RNA, 19 nt, synthetic construct
  misc_feature 1..19: note = Description of Artificial Sequence: Synthetic oligonucleotide
  source 1..19: mol_type = other RNA
gtgtgctggtcgctgtggg

SEQ ID NO: 991 - RNA, 19 nt, synthetic construct
  misc_feature 1..19: note = Description of Artificial Sequence: Synthetic oligonucleotide
  source 1..19: mol_type = other RNA
tgtgctggtcgctgtgggc

SEQ ID NO: 992 - RNA, 19 nt, synthetic construct
  misc_feature 1..19: note = Description of Artificial Sequence: Synthetic oligonucleotide
  source 1..19: mol_type = other RNA
gtgctggtcgctgtgggcc

SEQ ID NO: 993 - RNA, 19 nt, synthetic construct
  misc_feature 1..19: note = Description of Artificial Sequence: Synthetic oligonucleotide
  source 1..19: mol_type = other RNA
tgctggtcgctgtgggccc

SEQ ID NO: 994 - RNA, 19 nt, synthetic construct
  misc_feature 1..19: note = Description of Artificial Sequence: Synthetic oligonucleotide
  source 1..19: mol_type = other RNA
gctggtcgctgtgggccct

SEQ ID NO: 995 - RNA, 19 nt, synthetic construct
  misc_feature 1..19: note = Description of Artificial Sequence: Synthetic oligonucleotide
  source 1..19: mol_type = other RNA
ctggtcgctgtgggccctt

SEQ ID NO: 996 - RNA, 19 nt, synthetic construct
  misc_feature 1..19: note = Description of Artificial Sequence: Synthetic oligonucleotide
  source 1..19: mol_type = other RNA
tggtcgctgtgggccctta

SEQ ID NO: 997 - RNA, 19 nt, synthetic construct
  misc_feature 1..19: note = Description of Artificial Sequence: Synthetic oligonucleotide
  source 1..19: mol_type = other RNA
ggtcgctgtgggcccttaa

SEQ ID NO: 998 - RNA, 19 nt, synthetic construct
  misc_feature 1..19: note = Description of Artificial Sequence: Synthetic oligonucleotide
  source 1..19: mol_type = other RNA
gtcgctgtgggcccttaat

SEQ ID NO: 999 - RNA, 19 nt, synthetic construct
  misc_feature 1..19: note = Description of Artificial Sequence: Synthetic oligonucleotide
  source 1..19: mol_type = other RNA
tcgctgtgggcccttaatg

SEQ ID NO: 1000 - RNA, 19 nt, synthetic construct
  misc_feature 1..19: note = Description of Artificial Sequence: Synthetic oligonucleotide
  source 1..19: mol_type = other RNA
cgctgtgggcccttaatgg

SEQ ID NO: 1001 - RNA, 19 nt, synthetic construct
  misc_feature 1..19: note = Description of Artificial Sequence: Synthetic oligonucleotide
  source 1..19: mol_type = other RNA
gctgtgggcccttaatgga

SEQ ID NO: 1002 - RNA, 19 nt, synthetic construct
  misc_feature 1..19: note = Description of Artificial Sequence: Synthetic oligonucleotide
  source 1..19: mol_type = other RNA
ctgtgggcccttaatggac

SEQ ID NO: 1003 - RNA, 19 nt, synthetic construct
  misc_feature 1..19: note = Description of Artificial Sequence: Synthetic oligonucleotide
  source 1..19: mol_type = other RNA
tgtgggcccttaatggact

SEQ ID NO: 1004 - RNA, 19 nt, synthetic construct
  misc_feature 1..19: note = Description of Artificial Sequence: Synthetic oligonucleotide
  source 1..19: mol_type = other RNA
gtgggcccttaatggactg

SEQ ID NO: 1005 - RNA, 19 nt, synthetic construct
  misc_feature 1..19: note = Description of Artificial Sequence: Synthetic oligonucleotide
  source 1..19: mol_type = other RNA
tgggcccttaatggactgc

SEQ ID NO: 1006 - RNA, 19 nt, synthetic construct
  misc_feature 1..19: note = Description of Artificial Sequence: Synthetic oligonucleotide
  source 1..19: mol_type = other RNA
gggcccttaatggactgcc

SEQ ID NO: 1007 - RNA, 19 nt, synthetic construct
  misc_feature 1..19: note = Description of Artificial Sequence: Synthetic oligonucleotide
  source 1..19: mol_type = other RNA
ggcccttaatggactgccg

SEQ ID NO: 1008 - RNA, 19 nt, synthetic construct
  misc_feature 1..19: note = Description of Artificial Sequence: Synthetic oligonucleotide
  source 1..19: mol_type = other RNA
gcccttaatggactgccgg

SEQ ID NO: 1009 - RNA, 19 nt, synthetic construct
  misc_feature 1..19: note = Description of Artificial Sequence: Synthetic oligonucleotide
  source 1..19: mol_type = other RNA
cccttaatggactgccggg

SEQ ID NO: 1010 - RNA, 19 nt, synthetic construct
  misc_feature 1..19: note = Description of Artificial Sequence: Synthetic oligonucleotide
  source 1..19: mol_type = other RNA
ccttaatggactgccgggc

SEQ ID NO: 1011 - RNA, 19 nt, synthetic construct
  misc_feature 1..19: note = Description of Artificial Sequence: Synthetic oligonucleotide
  source 1..19: mol_type = other RNA
cttaatggactgccgggcc

SEQ ID NO: 1012 - RNA, 19 nt, synthetic construct
  misc_feature 1..19: note = Description of Artificial Sequence: Synthetic oligonucleotide
  source 1..19: mol_type = other RNA
ttaatggactgccgggcct

SEQ ID NO: 1013 - RNA, 19 nt, synthetic construct
  misc_feature 1..19: note = Description of Artificial Sequence: Synthetic oligonucleotide
  source 1..19: mol_type = other RNA
taatggactgccgggcctt

SEQ ID NO: 1014 - RNA, 19 nt, synthetic construct
  misc_feature 1..19: note = Description of Artificial Sequence: Synthetic oligonucleotide
  source 1..19: mol_type = other RNA
aatggactgccgggccttc

SEQ ID NO: 1015 - RNA, 19 nt, synthetic construct
  misc_feature 1..19: note = Description of Artificial Sequence: Synthetic oligonucleotide
  source 1..19: mol_type = other RNA
atggactgccgggccttcc

SEQ ID NO: 1016 - RNA, 19 nt, synthetic construct
  misc_feature 1..19: note = Description of Artificial Sequence: Synthetic oligonucleotide
  source 1..19: mol_type = other RNA
tggactgccgggccttcca

SEQ ID NO: 1017 - RNA, 19 nt, synthetic construct
  misc_feature 1..19: note = Description of Artificial Sequence: Synthetic oligonucleotide
  source 1..19: mol_type = other RNA
ggactgccgggccttccac

SEQ ID NO: 1018 - RNA, 19 nt, synthetic construct
  misc_feature 1..19: note = Description of Artificial Sequence: Synthetic oligonucleotide
  source 1..19: mol_type = other RNA
gactgccgggccttccact

SEQ ID NO: 1019 - RNA, 19 nt, synthetic construct
  misc_feature 1..19: note = Description of Artificial Sequence: Synthetic oligonucleotide
  source 1..19: mol_type = other RNA
actgccgggccttccacta

SEQ ID NO: 1020 - RNA, 19 nt, synthetic construct
  misc_feature 1..19: note = Description of Artificial Sequence: Synthetic oligonucleotide
  source 1..19: mol_type = other RNA
ctgccgggccttccactac

SEQ ID NO: 1021 - RNA, 19 nt, synthetic construct
  misc_feature 1..19: note = Description of Artificial Sequence: Synthetic oligonucleotide
  source 1..19: mol_type = other RNA
tgccgggccttccactaca

SEQ ID NO: 1022 - RNA, 19 nt, synthetic construct
  misc_feature 1..19: note = Description of Artificial Sequence: Synthetic oligonucleotide
  source 1..19: mol_type = other RNA
gccgggccttccactacaa

SEQ ID NO: 1023 - RNA, 19 nt, synthetic construct
  misc_feature 1..19: note = Description of Artificial Sequence: Synthetic oligonucleotide
  source 1..19: mol_type = other RNA
ccgggccttccactacaac

SEQ ID NO: 1024 - RNA, 19 nt, synthetic construct
  misc_feature 1..19: note = Description of Artificial Sequence: Synthetic oligonucleotide
  source 1..19: mol_type = other RNA
cgggccttccactacaacg

SEQ ID NO: 1025 - RNA, 19 nt, synthetic construct
  misc_feature 1..19: note = Description of Artificial Sequence: Synthetic oligonucleotide
  source 1..19: mol_type = other RNA
gggccttccactacaacgt

SEQ ID NO: 1026 - RNA, 19 nt, synthetic construct
  misc_feature 1..19: note = Description of Artificial Sequence: Synthetic oligonucleotide
  source 1..19: mol_type = other RNA
ggccttccactacaacgtg

SEQ ID NO: 1027 - RNA, 19 nt, synthetic construct
  misc_feature 1..19: note = Description of Artificial Sequence: Synthetic oligonucleotide
  source 1..19: mol_type = other RNA
gccttccactacaacgtga

SEQ ID NO: 1028 - RNA, 19 nt, synthetic construct
  misc_feature 1..19: note = Description of Artificial Sequence: Synthetic oligonucleotide
  source 1..19: mol_type = other RNA
ccttccactacaacgtgag

SEQ ID NO: 1029 - RNA, 19 nt, synthetic construct
  misc_feature 1..19: note = Description of Artificial Sequence: Synthetic oligonucleotide
  source 1..19: mol_type = other RNA
cttccactacaacgtgagc

SEQ ID NO: 1030 - RNA, 19 nt, synthetic construct
  misc_feature 1..19: note = Description of Artificial Sequence: Synthetic oligonucleotide
  source 1..19: mol_type = other RNA
ttccactacaacgtgagca

SEQ ID NO: 1031 - RNA, 19 nt, synthetic construct
  misc_feature 1..19: note = Description of Artificial Sequence: Synthetic oligonucleotide
  source 1..19: mol_type = other RNA
tccactacaacgtgagcag

SEQ ID NO: 1032 - RNA, 19 nt, synthetic construct
  misc_feature 1..19: note = Description of Artificial Sequence: Synthetic oligonucleotide
  source 1..19: mol_type = other RNA
ccactacaacgtgagcagc

SEQ ID NO: 1033 - RNA, 19 nt, synthetic construct
  misc_feature 1..19: note = Description of Artificial Sequence: Synthetic oligonucleotide
  source 1..19: mol_type = other RNA
cactacaacgtgagcagcc

SEQ ID NO: 1034 - RNA, 19 nt, synthetic construct
  misc_feature 1..19: note = Description of Artificial Sequence: Synthetic oligonucleotide
  source 1..19: mol_type = other RNA
actacaacgtgagcagcca

SEQ ID NO: 1035 - RNA, 19 nt, synthetic construct
  misc_feature 1..19: note = Description of Artificial Sequence: Synthetic oligonucleotide
  source 1..19: mol_type = other RNA
ctacaacgtgagcagccat

SEQ ID NO: 1036 - RNA, 19 nt, synthetic construct
  misc_feature 1..19: note = Description of Artificial Sequence: Synthetic oligonucleotide
  source 1..19: mol_type = other RNA
tacaacgtgagcagccatg

SEQ ID NO: 1037 - RNA, 19 nt, synthetic construct
  misc_feature 1..19: note = Description of Artificial Sequence: Synthetic oligonucleotide
  source 1..19: mol_type = other RNA
acaacgtgagcagccatgg

SEQ ID NO: 1038 - RNA, 19 nt, synthetic construct
  misc_feature 1..19: note = Description of Artificial Sequence: Synthetic oligonucleotide
  source 1..19: mol_type = other RNA
caacgtgagcagccatggt

SEQ ID NO: 1039 - RNA, 19 nt, synthetic construct
  misc_feature 1..19: note = Description of Artificial Sequence: Synthetic oligonucleotide
  source 1..19: mol_type = other RNA
aacgtgagcagccatggtt

SEQ ID NO: 1040 - RNA, 19 nt, synthetic construct
  misc_feature 1..19: note = Description of Artificial Sequence: Synthetic oligonucleotide
  source 1..19: mol_type = other RNA
acgtgagcagccatggttg

SEQ ID NO: 1041 - RNA, 19 nt, synthetic construct
  misc_feature 1..19: note = Description of Artificial Sequence: Synthetic oligonucleotide
  source 1..19: mol_type = other RNA
cgtgagcagccatggttgc

SEQ ID NO: 1042 - RNA, 19 nt, synthetic construct
  misc_feature 1..19: note = Description of Artificial Sequence: Synthetic oligonucleotide
  source 1..19: mol_type = other RNA
gtgagcagccatggttgcc

SEQ ID NO: 1043 - RNA, 19 nt, synthetic construct
  misc_feature 1..19: note = Description of Artificial Sequence: Synthetic oligonucleotide
  source 1..19: mol_type = other RNA
tgagcagccatggttgcca

SEQ ID NO: 1044 - RNA, 19 nt, synthetic construct
  misc_feature 1..19: note = Description of Artificial Sequence: Synthetic oligonucleotide
  source 1..19: mol_type = other RNA
gagcagccatggttgccaa

SEQ ID NO: 1045 - RNA, 19 nt, synthetic construct
  misc_feature 1..19: note = Description of Artificial Sequence: Synthetic oligonucleotide
  source 1..19: mol_type = other RNA
agcagccatggttgccaac

SEQ ID NO: 1046 - RNA, 19 nt, synthetic construct
  misc_feature 1..19: note = Description of Artificial Sequence: Synthetic oligonucleotide
  source 1..19: mol_type = other RNA
gcagccatggttgccaact

SEQ ID NO: 1047 - RNA, 19 nt, synthetic construct
  misc_feature 1..19: note = Description of Artificial Sequence: Synthetic oligonucleotide
  source 1..19: mol_type = other RNA
cagccatggttgccaactg

SEQ ID NO: 1048 - RNA, 19 nt, synthetic construct
  misc_feature 1..19: note = Description of Artificial Sequence: Synthetic oligonucleotide
  source 1..19: mol_type = other RNA
agccatggttgccaactgc

SEQ ID NO: 1049 - RNA, 19 nt, synthetic construct
  misc_feature 1..19: note = Description of Artificial Sequence: Synthetic oligonucleotide
  source 1..19: mol_type = other RNA
gccatggttgccaactgct

SEQ ID NO: 1050 - RNA, 19 nt, synthetic construct
  misc_feature 1..19: note = Description of Artificial Sequence: Synthetic oligonucleotide
  source 1..19: mol_type = other RNA
ccatggttgccaactgctg

SEQ ID NO: 1051 - RNA, 19 nt, synthetic construct
  misc_feature 1..19: note = Description of Artificial Sequence: Synthetic oligonucleotide
  source 1..19: mol_type = other RNA
catggttgccaactgctgc

SEQ ID NO: 1052 - RNA, 19 nt, synthetic construct
  misc_feature 1..19: note = Description of Artificial Sequence: Synthetic oligonucleotide
  source 1..19: mol_type = other RNA
atggttgccaactgctgcc

SEQ ID NO: 1053 - RNA, 19 nt, synthetic construct
  misc_feature 1..19: note = Description of Artificial Sequence: Synthetic oligonucleotide
  source 1..19: mol_type = other RNA
tggttgccaactgctgcca

SEQ ID NO: 1054 - RNA, 19 nt, synthetic construct
  misc_feature 1..19: note = Description of Artificial Sequence: Synthetic oligonucleotide
  source 1..19: mol_type = other RNA
ggttgccaactgctgccat

SEQ ID NO: 1055 - RNA, 19 nt, synthetic construct
  misc_feature 1..19: note = Description of Artificial Sequence: Synthetic oligonucleotide
  source 1..19: mol_type = other RNA
gttgccaactgctgccatg

SEQ ID NO: 1056 - RNA, 19 nt, synthetic construct
  misc_feature 1..19: note = Description of Artificial Sequence: Synthetic oligonucleotide
  source 1..19: mol_type = other RNA
ttgccaactgctgccatgg

SEQ ID NO: 1057 - RNA, 19 nt, synthetic construct
  misc_feature 1..19: note = Description of Artificial Sequence: Synthetic oligonucleotide
  source 1..19: mol_type = other RNA
tgccaactgctgccatgga

SEQ ID NO: 1058 - RNA, 19 nt, synthetic construct
  misc_feature 1..19: note = Description of Artificial Sequence: Synthetic oligonucleotide
  source 1..19: mol_type = other RNA
gccaactgctgccatggac

SEQ ID NO: 1059 - RNA, 19 nt, synthetic construct
  misc_feature 1..19: note = Description of Artificial Sequence: Synthetic oligonucleotide
  source 1..19: mol_type = other RNA
ccaactgctgccatggact

SEQ ID NO: 1060 - RNA, 19 nt, synthetic construct
  misc_feature 1..19: note = Description of Artificial Sequence: Synthetic oligonucleotide
  source 1..19: mol_type = other RNA
caactgctgccatggactc

SEQ ID NO: 1061 - RNA, 19 nt, synthetic construct
  misc_feature 1..19: note = Description of Artificial Sequence: Synthetic oligonucleotide
  source 1..19: mol_type = other RNA
aactgctgccatggactca

SEQ ID NO: 1062 - RNA, 19 nt, synthetic construct
  misc_feature 1..19: note = Description of Artificial Sequence: Synthetic oligonucleotide
  source 1..19: mol_type = other RNA
actgctgccatggactcaa

SEQ ID NO: 1063 - RNA, 19 nt, synthetic construct
  misc_feature 1..19: note = Description of Artificial Sequence: Synthetic oligonucleotide
  source 1..19: mol_type = other RNA
ctgctgccatggactcaac

SEQ ID NO: 1064 - RNA, 19 nt, synthetic construct
  misc_feature 1..19: note = Description of Artificial Sequence: Synthetic oligonucleotide
  source 1..19: mol_type = other RNA
tgctgccatggactcaaca

SEQ ID NO: 1065 - RNA, 19 nt, synthetic construct
  misc_feature 1..19: note = Description of Artificial Sequence: Synthetic oligonucleotide
  source 1..19: mol_type = other RNA
gctgccatggactcaacac

SEQ ID NO: 1066 - RNA, 19 nt, synthetic construct
  misc_feature 1..19: note = Description of Artificial Sequence: Synthetic oligonucleotide
  source 1..19: mol_type = other RNA
ctgccatggactcaacact

SEQ ID NO: 1067 - RNA, 19 nt, synthetic construct
  misc_feature 1..19: note = Description of Artificial Sequence: Synthetic oligonucleotide
  source 1..19: mol_type = other RNA
tgccatggactcaacactc

SEQ ID NO: 1068 - RNA, 19 nt, synthetic construct
  misc_feature 1..19: note = Description of Artificial Sequence: Synthetic oligonucleotide
  source 1..19: mol_type = other RNA
gccatggactcaacactcg

SEQ ID NO: 1069 - RNA, 19 nt, synthetic construct
  misc_feature 1..19: note = Description of Artificial Sequence: Synthetic oligonucleotide
  source 1..19: mol_type = other RNA
ccatggactcaacactcgc

SEQ ID NO: 1070 - RNA, 19 nt, synthetic construct
  misc_feature 1..19: note = Description of Artificial Sequence: Synthetic oligonucleotide
  source 1..19: mol_type = other RNA
catggactcaacactcgcc

SEQ ID NO: 1071 - RNA, 19 nt, synthetic construct
  misc_feature 1..19: note = Description of Artificial Sequence: Synthetic oligonucleotide
  source 1..19: mol_type = other RNA
atggactcaacactcgccc

SEQ ID NO: 1072 - RNA, 19 nt, synthetic construct
  misc_feature 1..19: note = Description of Artificial Sequence: Synthetic oligonucleotide
  source 1..19: mol_type = other RNA
tggactcaacactcgcccc

SEQ ID NO: 1073 - RNA, 19 nt, synthetic construct
  misc_feature 1..19: note = Description of Artificial Sequence: Synthetic oligonucleotide
  source 1..19: mol_type = other RNA
ggactcaacactcgcccca

SEQ ID NO: 1074 - RNA, 19 nt, synthetic construct
  misc_feature 1..19: note = Description of Artificial Sequence: Synthetic oligonucleotide
  source 1..19: mol_type = other RNA
gactcaacactcgccccac

SEQ ID NO: 1075 - RNA, 19 nt, synthetic construct
  misc_feature 1..19: note = Description of Artificial Sequence: Synthetic oligonucleotide
  source 1..19: mol_type = other RNA
actcaacactcgccccaca

SEQ ID NO: 1076 - RNA, 19 nt, synthetic construct
  misc_feature 1..19: note = Description of Artificial Sequence: Synthetic oligonucleotide
  source 1..19: mol_type = other RNA
ctcaacactcgccccacac

SEQ ID NO: 1077 - RNA, 19 nt, synthetic construct
  misc_feature 1..19: note = Description of Artificial Sequence: Synthetic oligonucleotide
  source 1..19: mol_type = other RNA
tcaacactcgccccacacg

SEQ ID NO: 1078 - RNA, 19 nt, synthetic construct
  misc_feature 1..19: note = Description of Artificial Sequence: Synthetic oligonucleotide
  source 1..19: mol_type = other RNA
caacactcgccccacacga

SEQ ID NO: 1079 - RNA, 19 nt, synthetic construct
  misc_feature 1..19: note = Description of Artificial Sequence: Synthetic oligonucleotide
  source 1..19: mol_type = other RNA
aacactcgccccacacgag

SEQ ID NO: 1080 - RNA, 19 nt, synthetic construct
  misc_feature 1..19: note = Description of Artificial Sequence: Synthetic oligonucleotide
  source 1..19: mol_type = other RNA
acactcgccccacacgagg

SEQ ID NO: 1081 - RNA, 19 nt, synthetic construct
  misc_feature 1..19: note = Description of Artificial Sequence: Synthetic oligonucleotide
  source 1..19: mol_type = other RNA
cactcgccccacacgaggc

SEQ ID NO: 1082 - RNA, 19 nt, synthetic construct
  misc_feature 1..19: note = Description of Artificial Sequence: Synthetic oligonucleotide
  source 1..19: mol_type = other RNA
actcgccccacacgaggct

SEQ ID NO: 1083 - RNA, 19 nt, synthetic construct
  misc_feature 1..19: note = Description of Artificial Sequence: Synthetic oligonucleotide
  source 1..19: mol_type = other RNA
ctcgccccacacgaggctg

SEQ ID NO: 1084 - RNA, 19 nt, synthetic construct
  misc_feature 1..19: note = Description of Artificial Sequence: Synthetic oligonucleotide
  source 1..19: mol_type = other RNA
tcgccccacacgaggctgc

SEQ ID NO: 1085 - RNA, 19 nt, synthetic construct
  misc_feature 1..19: note = Description of Artificial Sequence: Synthetic oligonucleotide
  source 1..19: mol_type = other RNA
cgccccacacgaggctgcg

SEQ ID NO: 1086 - RNA, 19 nt, synthetic construct
  misc_feature 1..19: note = Description of Artificial Sequence: Synthetic oligonucleotide
  source 1..19: mol_type = other RNA
gccccacacgaggctgcgg

SEQ ID NO: 1087 - RNA, 19 nt, synthetic construct
  misc_feature 1..19: note = Description of Artificial Sequence: Synthetic oligonucleotide
  source 1..19: mol_type = other RNA
ccccacacgaggctgcggc

SEQ ID NO: 1088 - RNA, 19 nt, synthetic construct
  misc_feature 1..19: note = Description of Artificial Sequence: Synthetic oligonucleotide
  source 1..19: mol_type = other RNA
cccacacgaggctgcggcg

SEQ ID NO: 1089 - RNA, 19 nt, synthetic construct
  misc_feature 1..19: note = Description of Artificial Sequence: Synthetic oligonucleotide
  source 1..19: mol_type = other RNA
ccacacgaggctgcggcgt

SEQ ID NO: 1090 - RNA, 19 nt, synthetic construct
  misc_feature 1..19: note = Description of Artificial Sequence: Synthetic oligonucleotide
  source 1..19: mol_type = other RNA
cacacgaggctgcggcgtt

SEQ ID NO: 1091 - RNA, 19 nt, synthetic construct
  misc_feature 1..19: note = Description of Artificial Sequence: Synthetic oligonucleotide
  source 1..19: mol_type = other RNA
acacgaggctgcggcgttc

SEQ ID NO: 1092 - RNA, 19 nt, synthetic construct
  misc_feature 1..19: note = Description of Artificial Sequence: Synthetic oligonucleotide
  source 1..19: mol_type = other RNA
cacgaggctgcggcgttct

SEQ ID NO: 1093 - RNA, 19 nt, synthetic construct
  misc_feature 1..19: note = Description of Artificial Sequence: Synthetic oligonucleotide
  source 1..19: mol_type = other RNA
acgaggctgcggcgttctg

SEQ ID NO: 1094 - RNA, 19 nt, synthetic construct
  misc_feature 1..19: note = Description of Artificial Sequence: Synthetic oligonucleotide
  source 1..19: mol_type = other RNA
cgaggctgcggcgttctgg

SEQ ID NO: 1095 - RNA, 19 nt, synthetic construct
  misc_feature 1..19: note = Description of Artificial Sequence: Synthetic oligonucleotide
  source 1..19: mol_type = other RNA
gaggctgcggcgttctggg

SEQ ID NO: 1096 - RNA, 19 nt, synthetic construct
  misc_feature 1..19: note = Description of Artificial Sequence: Synthetic oligonucleotide
  source 1..19: mol_type = other RNA
aggctgcggcgttctgggc

SEQ ID NO: 1097 - RNA, 19 nt, synthetic construct
  misc_feature 1..19: note = Description of Artificial Sequence: Synthetic oligonucleotide
  source 1..19: mol_type = other RNA
ggctgcggcgttctgggcg

SEQ ID NO: 1098 - RNA, 19 nt, synthetic construct
  misc_feature 1..19: note = Description of Artificial Sequence: Synthetic oligonucleotide
  source 1..19: mol_type = other RNA
gctgcggcgttctgggcgc

SEQ ID NO: 1099 - RNA, 19 nt, synthetic construct
  misc_feature 1..19: note = Description of Artificial Sequence: Synthetic oligonucleotide
  source 1..19: mol_type = other RNA
ctgcggcgttctgggcgct

SEQ ID NO: 1100 - RNA, 19 nt, synthetic construct
  misc_feature 1..19: note = Description of Artificial Sequence: Synthetic oligonucleotide
  source 1..19: mol_type = other RNA
tgcggcgttctgggcgctg

SEQ ID NO: 1101 - RNA, 19 nt, synthetic construct
  misc_feature 1..19: note = Description of Artificial Sequence: Synthetic oligonucleotide
  source 1..19: mol_type = other RNA
gcggcgttctgggcgctgt

SEQ ID NO: 1102 - RNA, 19 nt, synthetic construct
  misc_feature 1..19: note = Description of Artificial Sequence: Synthetic oligonucleotide
  source 1..19: mol_type = other RNA
cggcgttctgggcgctgtg

SEQ ID NO: 1103 - RNA, 19 nt, synthetic construct
  misc_feature 1..19: note = Description of Artificial Sequence: Synthetic oligonucleotide
  source 1..19: mol_type = other RNA
ggcgttctgggcgctgtga

SEQ ID NO: 1104 - RNA, 19 nt, synthetic construct
  misc_feature 1..19: note = Description of Artificial Sequence: Synthetic oligonucleotide
  source 1..19: mol_type = other RNA
gcgttctgggcgctgtgac

SEQ ID NO: 1105 - RNA, 19 nt, synthetic construct
  misc_feature 1..19: note = Description of Artificial Sequence: Synthetic oligonucleotide
  source 1..19: mol_type = other RNA
cgttctgggcgctgtgacc

SEQ ID NO: 1106 - RNA, 19 nt, synthetic construct
  misc_feature 1..19: note = Description of Artificial Sequence: Synthetic oligonucleotide
  source 1..19: mol_type = other RNA
gttctgggcgctgtgacct

SEQ ID NO: 1107 - RNA, 19 nt, synthetic construct
  misc_feature 1..19: note = Description of Artificial Sequence: Synthetic oligonucleotide
  source 1..19: mol_type = other RNA
ttctgggcgctgtgacctc

SEQ ID NO: 1108 - RNA, 19 nt, synthetic construct
  misc_feature 1..19: note = Description of Artificial Sequence: Synthetic oligonucleotide
  source 1..19: mol_type = other RNA
tctgggcgctgtgacctct

SEQ ID NO: 1109 - RNA, 19 nt, synthetic construct
  misc_feature 1..19: note = Description of Artificial Sequence: Synthetic oligonucleotide
  source 1..19: mol_type = other RNA
ctgggcgctgtgacctctt

SEQ ID NO: 1110 - RNA, 19 nt, synthetic construct
  misc_feature 1..19: note = Description of Artificial Sequence: Synthetic oligonucleotide
  source 1..19: mol_type = other RNA
tgggcgctgtgacctcttc

SEQ ID NO: 1111 - RNA, 19 nt, synthetic construct
  misc_feature 1..19: note = Description of Artificial Sequence: Synthetic oligonucleotide
  source 1..19: mol_type = other RNA
gggcgctgtgacctcttcc

SEQ ID NO: 1112 - RNA, 19 nt, synthetic construct
  misc_feature 1..19: note = Description of Artificial Sequence: Synthetic oligonucleotide
  source 1..19: mol_type = other RNA
ggcgctgtgacctcttcca

SEQ ID NO: 1113 - RNA, 19 nt, synthetic construct
  misc_feature 1..19: note = Description of Artificial Sequence: Synthetic oligonucleotide
  source 1..19: mol_type = other RNA
gcgctgtgacctcttccag

SEQ ID NO: 1114 - RNA, 19 nt, synthetic construct
  misc_feature 1..19: note = Description of Artificial Sequence: Synthetic oligonucleotide
  source 1..19: mol_type = other RNA
cgctgtgacctcttccaga

SEQ ID NO: 1115 - RNA, 19 nt, synthetic construct
  misc_feature 1..19: note = Description of Artificial Sequence: Synthetic oligonucleotide
  source 1..19: mol_type = other RNA
gctgtgacctcttccagaa

SEQ ID NO: 1116 - RNA, 19 nt, synthetic construct
  misc_feature 1..19: note = Description of Artificial Sequence: Synthetic oligonucleotide
  source 1..19: mol_type = other RNA
ctgtgacctcttccagaag

SEQ ID NO: 1117 - RNA, 19 nt, synthetic construct
  misc_feature 1..19: note = Description of Artificial Sequence: Synthetic oligonucleotide
  source 1..19: mol_type = other RNA
tgtgacctcttccagaaga

SEQ ID NO: 1118 - RNA, 19 nt, synthetic construct
  misc_feature 1..19: note = Description of Artificial Sequence: Synthetic oligonucleotide
  source 1..19: mol_type = other RNA
gtgacctcttccagaagaa

SEQ ID NO: 1119 - RNA, 19 nt, synthetic construct
  misc_feature 1..19: note = Description of Artificial Sequence: Synthetic oligonucleotide
  source 1..19: mol_type = other RNA
tgacctcttccagaagaaa

SEQ ID NO: 1120 - RNA, 19 nt, synthetic construct
  misc_feature 1..19: note = Description of Artificial Sequence: Synthetic oligonucleotide
  source 1..19: mol_type = other RNA
gacctcttccagaagaaag

SEQ ID NO: 1121 - RNA, 19 nt, synthetic construct
  misc_feature 1..19: note = Description of Artificial Sequence: Synthetic oligonucleotide
  source 1..19: mol_type = other RNA
acctcttccagaagaaaga

SEQ ID NO: 1122 - RNA, 19 nt, synthetic construct
  misc_feature 1..19: note = Description of Artificial Sequence: Synthetic oligonucleotide
  source 1..19: mol_type = other RNA
cctcttccagaagaaagac

SEQ ID NO: 1123 - RNA, 19 nt, synthetic construct
  misc_feature 1..19: note = Description of Artificial Sequence: Synthetic oligonucleotide
  source 1..19: mol_type = other RNA
ctcttccagaagaaagact

SEQ ID NO: 1124 - RNA, 19 nt, synthetic construct
  misc_feature 1..19: note = Description of Artificial Sequence: Synthetic oligonucleotide
  source 1..19: mol_type = other RNA
tcttccagaagaaagacta

SEQ ID NO: 1125 - RNA, 19 nt, synthetic construct
  misc_feature 1..19: note = Description of Artificial Sequence: Synthetic oligonucleotide
  source 1..19: mol_type = other RNA
cttccagaagaaagactac

SEQ ID NO: 1126 - RNA, 19 nt, synthetic construct
  misc_feature 1..19: note = Description of Artificial Sequence: Synthetic oligonucleotide
  source 1..19: mol_type = other RNA
ttccagaagaaagactacg

SEQ ID NO: 1127 - RNA, 19 nt, synthetic construct
  misc_feature 1..19: note = Description of Artificial Sequence: Synthetic oligonucleotide
  source 1..19: mol_type = other RNA
tccagaagaaagactacgt

SEQ ID NO: 1128 - RNA, 19 nt, synthetic construct
  misc_feature 1..19: note = Description of Artificial Sequence: Synthetic oligonucleotide
  source 1..19: mol_type = other RNA
ccagaagaaagactacgta

SEQ ID NO: 1129 - RNA, 19 nt, synthetic construct
  misc_feature 1..19: note = Description of Artificial Sequence: Synthetic oligonucleotide
  source 1..19: mol_type = other RNA
cagaagaaagactacgtac

SEQ ID NO: 1130 - RNA, 19 nt, synthetic construct
  misc_feature 1..19: note = Description of Artificial Sequence: Synthetic oligonucleotide
  source 1..19: mol_type = other RNA
agaagaaagactacgtacg

SEQ ID NO: 1131 - RNA, 19 nt, synthetic construct
  misc_feature 1..19: note = Description of Artificial Sequence: Synthetic oligonucleotide
  source 1..19: mol_type = other RNA
gaagaaagactacgtacgg

SEQ ID NO: 1132 - RNA, 19 nt, synthetic construct
  misc_feature 1..19: note = Description of Artificial Sequence: Synthetic oligonucleotide
  source 1..19: mol_type = other RNA
aagaaagactacgtacgga

SEQ ID NO: 1133 - RNA, 19 nt, synthetic construct
  misc_feature 1..19: note = Description of Artificial Sequence: Synthetic oligonucleotide
  source 1..19: mol_type = other RNA
agaaagactacgtacggac

SEQ ID NO: 1134 - RNA, 19 nt, synthetic construct
  misc_feature 1..19: note = Description of Artificial Sequence: Synthetic oligonucleotide
  source 1..19: mol_type = other RNA
gaaagactacgtacggacc

SEQ ID NO: 1135 - RNA, 19 nt, synthetic construct
  misc_feature 1..19: note = Description of Artificial Sequence: Synthetic oligonucleotide
  source 1..19: mol_type = other RNA
aaagactacgtacggacct

SEQ ID NO: 1136 - RNA, 19 nt, synthetic construct
  misc_feature 1..19: note = Description of Artificial Sequence: Synthetic oligonucleotide
  source 1..19: mol_type = other RNA
aagactacgtacggacctg

SEQ ID NO: 1137 - RNA, 19 nt, synthetic construct
  misc_feature 1..19: note = Description of Artificial Sequence: Synthetic oligonucleotide
  source 1..19: mol_type = other RNA
agactacgtacggacctgc

SEQ ID NO: 1138 - RNA, 19 nt, synthetic construct
  misc_feature 1..19: note = Description of Artificial Sequence: Synthetic oligonucleotide
  source 1..19: mol_type = other RNA
gactacgtacggacctgca

SEQ ID NO: 1139 - RNA, 19 nt, synthetic construct
  misc_feature 1..19: note = Description of Artificial Sequence: Synthetic oligonucleotide
  source 1..19: mol_type = other RNA
actacgtacggacctgcat

SEQ ID NO: 1140 - RNA, 19 nt, synthetic construct
  misc_feature 1..19: note = Description of Artificial Sequence: Synthetic oligonucleotide
  source 1..19: mol_type = other RNA
ctacgtacggacctgcatc

SEQ ID NO: 1141 - RNA, 19 nt, synthetic construct
  misc_feature 1..19: note = Description of Artificial Sequence: Synthetic oligonucleotide
  source 1..19: mol_type = other RNA
tacgtacggacctgcatca

SEQ ID NO: 1142 - RNA, 19 nt, synthetic construct
  misc_feature 1..19: note = Description of Artificial Sequence: Synthetic oligonucleotide
  source 1..19: mol_type = other RNA
acgtacggacctgcatcat

SEQ ID NO: 1143 - RNA, 19 nt, synthetic construct
  misc_feature 1..19: note = Description of Artificial Sequence: Synthetic oligonucleotide
  source 1..19: mol_type = other RNA
cgtacggacctgcatcatg

SEQ ID NO: 1144 - RNA, 19 nt, synthetic construct
  misc_feature 1..19: note = Description of Artificial Sequence: Synthetic oligonucleotide
  source 1..19: mol_type = other RNA
gtacggacctgcatcatga

SEQ ID NO: 1145 - RNA, 19 nt, synthetic construct
  misc_feature 1..19: note = Description of Artificial Sequence: Synthetic oligonucleotide
  source 1..19: mol_type = other RNA
tacggacctgcatcatgaa

SEQ ID NO: 1146 - RNA, 19 nt, synthetic construct
  misc_feature 1..19: note = Description of Artificial Sequence: Synthetic oligonucleotide
  source 1..19: mol_type = other RNA
acggacctgcatcatgaac

SEQ ID NO: 1147 - RNA, 19 nt, synthetic construct
  misc_feature 1..19: note = Description of Artificial Sequence: Synthetic oligonucleotide
  source 1..19: mol_type = other RNA
cggacctgcatcatgaaca

SEQ ID NO: 1148 - RNA, 19 nt, synthetic construct
  misc_feature 1..19: note = Description of Artificial Sequence: Synthetic oligonucleotide
  source 1..19: mol_type = other RNA
ggacctgcatcatgaacaa

SEQ ID NO: 1149 - RNA, 19 nt, synthetic construct
  misc_feature 1..19: note = Description of Artificial Sequence: Synthetic oligonucleotide
  source 1..19: mol_type = other RNA
gacctgcatcatgaacaat

SEQ ID NO: 1150 - RNA, 19 nt, synthetic construct
  misc_feature 1..19: note = Description of Artificial Sequence: Synthetic oligonucleotide
  source 1..19: mol_type = other RNA
acctgcatcatgaacaatg

SEQ ID NO: 1151 - RNA, 19 nt, synthetic construct
  misc_feature 1..19: note = Description of Artificial Sequence: Synthetic oligonucleotide
  source 1..19: mol_type = other RNA
cctgcatcatgaacaatgg

SEQ ID NO: 1152 - RNA, 19 nt, synthetic construct
  misc_feature 1..19: note = Description of Artificial Sequence: Synthetic oligonucleotide
  source 1..19: mol_type = other RNA
ctgcatcatgaacaatggg

SEQ ID NO: 1153 - RNA, 19 nt, synthetic construct
  misc_feature 1..19: note = Description of Artificial Sequence: Synthetic oligonucleotide
  source 1..19: mol_type = other RNA
tgcatcatgaacaatgggg

SEQ ID NO: 1154 - RNA, 19 nt, synthetic construct
  misc_feature 1..19: note = Description of Artificial Sequence: Synthetic oligonucleotide
  source 1..19: mol_type = other RNA
gcatcatgaacaatggggt

SEQ ID NO: 1155 - RNA, 19 nt, synthetic construct
  misc_feature 1..19: note = Description of Artificial Sequence: Synthetic oligonucleotide
  source 1..19: mol_type = other RNA
catcatgaacaatggggtt

SEQ ID NO: 1156 - RNA, 19 nt, synthetic construct
  misc_feature 1..19: note = Description of Artificial Sequence: Synthetic oligonucleotide
  source 1..19: mol_type = other RNA
atcatgaacaatggggttg

SEQ ID NO: 1157 - RNA, 19 nt, synthetic construct
  misc_feature 1..19: note = Description of Artificial Sequence: Synthetic oligonucleotide
  source 1..19: mol_type = other RNA
tcatgaacaatggggttgg

SEQ ID NO: 1158 - RNA, 19 nt, synthetic construct
  misc_feature 1..19: note = Description of Artificial Sequence: Synthetic oligonucleotide
  source 1..19: mol_type = other RNA
catgaacaatggggttggg

SEQ ID NO: 1159 - RNA, 19 nt, synthetic construct
  misc_feature 1..19: note = Description of Artificial Sequence: Synthetic oligonucleotide
  source 1..19: mol_type = other RNA
atgaacaatggggttgggt

SEQ ID NO: 1160 - RNA, 19 nt, synthetic construct
  misc_feature 1..19: note = Description of Artificial Sequence: Synthetic oligonucleotide
  source 1..19: mol_type = other RNA
tgaacaatggggttgggta

SEQ ID NO: 1161 - RNA, 19 nt, synthetic construct
  misc_feature 1..19: note = Description of Artificial Sequence: Synthetic oligonucleotide
  source 1..19: mol_type = other RNA
gaacaatggggttgggtac

SEQ ID NO: 1162 - RNA, 19 nt, synthetic construct
  misc_feature 1..19: note = Description of Artificial Sequence: Synthetic oligonucleotide
  source 1..19: mol_type = other RNA
aacaatggggttgggtacc

SEQ ID NO: 1163 - RNA, 19 nt, synthetic construct
  misc_feature 1..19: note = Description of Artificial Sequence: Synthetic oligonucleotide
  source 1..19: mol_type = other RNA
acaatggggttgggtaccg

SEQ ID NO: 1164 - RNA, 19 nt, synthetic construct
  misc_feature 1..19: note = Description of Artificial Sequence: Synthetic oligonucleotide
  source 1..19: mol_type = other RNA
caatggggttgggtaccgg

SEQ ID NO: 1165 - RNA, 19 nt, synthetic construct
  misc_feature 1..19: note = Description of Artificial Sequence: Synthetic oligonucleotide
  source 1..19: mol_type = other RNA
aatggggttgggtaccggg

SEQ ID NO: 1166 - RNA, 19 nt, synthetic construct
  misc_feature 1..19: note = Description of Artificial Sequence: Synthetic oligonucleotide
  source 1..19: mol_type = other RNA
atggggttgggtaccgggg

SEQ ID NO: 1167 - RNA, 19 nt, synthetic construct
  misc_feature 1..19: note = Description of Artificial Sequence: Synthetic oligonucleotide
  source 1..19: mol_type = other RNA
tggggttgggtaccggggc

SEQ ID NO: 1168 - RNA, 19 nt, synthetic construct
  misc_feature 1..19: note = Description of Artificial Sequence: Synthetic oligonucleotide
  source 1..19: mol_type = other RNA
ggggttgggtaccggggca

SEQ ID NO: 1169 - RNA, 19 nt, synthetic construct
  misc_feature 1..19: note = Description of Artificial Sequence: Synthetic oligonucleotide
  source 1..19: mol_type = other RNA
gggttgggtaccggggcac

SEQ ID NO: 1170 - RNA, 19 nt, synthetic construct
  misc_feature 1..19: note = Description of Artificial Sequence: Synthetic oligonucleotide
  source 1..19: mol_type = other RNA
ggttgggtaccggggcacc

SEQ ID NO: 1171 - RNA, 19 nt, synthetic construct
  misc_feature 1..19: note = Description of Artificial Sequence: Synthetic oligonucleotide
  source 1..19: mol_type = other RNA
gttgggtaccggggcacca

SEQ ID NO: 1172 - RNA, 19 nt, synthetic construct
  misc_feature 1..19: note = Description of Artificial Sequence: Synthetic oligonucleotide
  source 1..19: mol_type = other RNA
ttgggtaccggggcaccat

SEQ ID NO: 1173 - RNA, 19 nt, synthetic construct
  misc_feature 1..19: note = Description of Artificial Sequence: Synthetic oligonucleotide
  source 1..19: mol_type = other RNA
tgggtaccggggcaccatg

SEQ ID NO: 1174 - RNA, 19 nt, synthetic construct
  misc_feature 1..19: note = Description of Artificial Sequence: Synthetic oligonucleotide
  source 1..19: mol_type = other RNA
gggtaccggggcaccatgg

SEQ ID NO: 1175 - RNA, 19 nt, synthetic construct
  misc_feature 1..19: note = Description of Artificial Sequence: Synthetic oligonucleotide
  source 1..19: mol_type = other RNA
ggtaccggggcaccatggc

SEQ ID NO: 1176 - RNA, 19 nt, synthetic construct
  misc_feature 1..19: note = Description of Artificial Sequence: Synthetic oligonucleotide
  source 1..19: mol_type = other RNA
gtaccggggcaccatggcc

SEQ ID NO: 1177 - RNA, 19 nt, synthetic construct
  misc_feature 1..19: note = Description of Artificial Sequence: Synthetic oligonucleotide
  source 1..19: mol_type = other RNA
taccggggcaccatggcca

SEQ ID NO: 1178 - RNA, 19 nt, synthetic construct
  misc_feature 1..19: note = Description of Artificial Sequence: Synthetic oligonucleotide
  source 1..19: mol_type = other RNA
accggggcaccatggccac

SEQ ID NO: 1179 - RNA, 19 nt, synthetic construct
  misc_feature 1..19: note = Description of Artificial Sequence: Synthetic oligonucleotide
  source 1..19: mol_type = other RNA
ccggggcaccatggccacg

SEQ ID NO: 1180 - RNA, 19 nt, synthetic construct
  misc_feature 1..19: note = Description of Artificial Sequence: Synthetic oligonucleotide
  source 1..19: mol_type = other RNA
cggggcaccatggccacga

SEQ ID NO: 1181 - RNA, 19 nt, synthetic construct
  misc_feature 1..19: note = Description of Artificial Sequence: Synthetic oligonucleotide
  source 1..19: mol_type = other RNA
ggggcaccatggccacgac

SEQ ID NO: 1182 - RNA, 19 nt, synthetic construct
  misc_feature 1..19: note = Description of Artificial Sequence: Synthetic oligonucleotide
  source 1..19: mol_type = other RNA
gggcaccatggccacgacc

SEQ ID NO: 1183 - RNA, 19 nt, synthetic construct
  misc_feature 1..19: note = Description of Artificial Sequence: Synthetic oligonucleotide
  source 1..19: mol_type = other RNA
ggcaccatggccacgaccg

SEQ ID NO: 1184 - RNA, 19 nt, synthetic construct
  misc_feature 1..19: note = Description of Artificial Sequence: Synthetic oligonucleotide
  source 1..19: mol_type = other RNA
gcaccatggccacgaccgt

SEQ ID NO: 1185 - RNA, 19 nt, synthetic construct
  misc_feature 1..19: note = Description of Artificial Sequence: Synthetic oligonucleotide
  source 1..19: mol_type = other RNA
caccatggccacgaccgtg

SEQ ID NO: 1186 - RNA, 19 nt, synthetic construct
  misc_feature 1..19: note = Description of Artificial Sequence: Synthetic oligonucleotide
  source 1..19: mol_type = other RNA
accatggccacgaccgtgg

SEQ ID NO: 1187 - RNA, 19 nt, synthetic construct
  misc_feature 1..19: note = Description of Artificial Sequence: Synthetic oligonucleotide
  source 1..19: mol_type = other RNA
ccatggccacgaccgtggg

SEQ ID NO: 1188 - RNA, 19 nt, synthetic construct
  misc_feature 1..19: note = Description of Artificial Sequence: Synthetic oligonucleotide
  source 1..19: mol_type = other RNA
catggccacgaccgtgggt

SEQ ID NO: 1189 - RNA, 19 nt, synthetic construct
  misc_feature 1..19: note = Description of Artificial Sequence: Synthetic oligonucleotide
  source 1..19: mol_type = other RNA
atggccacgaccgtgggtg

SEQ ID NO: 1190 - RNA, 19 nt, synthetic construct
  misc_feature 1..19: note = Description of Artificial Sequence: Synthetic oligonucleotide
  source 1..19: mol_type = other RNA
tggccacgaccgtgggtgg

SEQ ID NO: 1191 - RNA, 19 nt, synthetic construct
  misc_feature 1..19: note = Description of Artificial Sequence: Synthetic oligonucleotide
  source 1..19: mol_type = other RNA
ggccacgaccgtgggtggc

SEQ ID NO: 1192 - RNA, 19 nt, synthetic construct
  misc_feature 1..19: note = Description of Artificial Sequence: Synthetic oligonucleotide
  source 1..19: mol_type = other RNA
gccacgaccgtgggtggcc

SEQ ID NO: 1193 - RNA, 19 nt, synthetic construct
  misc_feature 1..19: note = Description of Artificial Sequence: Synthetic oligonucleotide
  source 1..19: mol_type = other RNA
ccacgaccgtgggtggcct

SEQ ID NO: 1194 - RNA, 19 nt, synthetic construct
  misc_feature 1..19: note = Description of Artificial Sequence: Synthetic oligonucleotide
  source 1..19: mol_type = other RNA
cacgaccgtgggtggcctg

SEQ ID NO: 1195 - RNA, 19 nt, synthetic construct
  misc_feature 1..19: note = Description of Artificial Sequence: Synthetic oligonucleotide
  source 1..19: mol_type = other RNA
acgaccgtgggtggcctgc

SEQ ID NO: 1196 - RNA, 19 nt, synthetic construct
  misc_feature 1..19: note = Description of Artificial Sequence: Synthetic oligonucleotide
  source 1..19: mol_type = other RNA
cgaccgtgggtggcctgcc

SEQ ID NO: 1197 - RNA, 19 nt, synthetic construct
  misc_feature 1..19: note = Description of Artificial Sequence: Synthetic oligonucleotide
  source 1..19: mol_type = other RNA
gaccgtgggtggcctgccc

SEQ ID NO: 1198 - RNA, 19 nt, synthetic construct
  misc_feature 1..19: note = Description of Artificial Sequence: Synthetic oligonucleotide
  source 1..19: mol_type = other RNA
accgtgggtggcctgccct

SEQ ID NO: 1199 - RNA, 19 nt, synthetic construct
  misc_feature 1..19: note = Description of Artificial Sequence: Synthetic oligonucleotide
  source 1..19: mol_type = other RNA
ccgtgggtggcctgccctg

SEQ ID NO: 1200 - RNA, 19 nt, synthetic construct
  misc_feature 1..19: note = Description of Artificial Sequence: Synthetic oligonucleotide
  source 1..19: mol_type = other RNA
cgtgggtggcctgccctgc

SEQ ID NO: 1201 - RNA, 19 nt, synthetic construct
  misc_feature 1..19: note = Description of Artificial Sequence: Synthetic oligonucleotide
  source 1..19: mol_type = other RNA
gtgggtggcctgccctgcc

SEQ ID NO: 1202 - RNA, 19 nt, synthetic construct
  misc_feature 1..19: note = Description of Artificial Sequence: Synthetic oligonucleotide
  source 1..19: mol_type = other RNA
tgggtggcctgccctgcca

SEQ ID NO: 1203 - RNA, 19 nt, synthetic construct
  misc_feature 1..19: note = Description of Artificial Sequence: Synthetic oligonucleotide
  source 1..19: mol_type = other RNA
gggtggcctgccctgccag

SEQ ID NO: 1204 - RNA, 19 nt, synthetic construct
  misc_feature 1..19: note = Description of Artificial Sequence: Synthetic oligonucleotide
  source 1..19: mol_type = other RNA
ggtggcctgccctgccagg

SEQ ID NO: 1205 - RNA, 19 nt, synthetic construct
  misc_feature 1..19: note = Description of Artificial Sequence: Synthetic oligonucleotide
  source 1..19: mol_type = other RNA
gtggcctgccctgccaggc

SEQ ID NO: 1206 - RNA, 19 nt, synthetic construct
  misc_feature 1..19: note = Description of Artificial Sequence: Synthetic oligonucleotide
  source 1..19: mol_type = other RNA
tggcctgccctgccaggct

SEQ ID NO: 1207 - RNA, 19 nt, synthetic construct
  misc_feature 1..19: note = Description of Artificial Sequence: Synthetic oligonucleotide
  source 1..19: mol_type = other RNA
ggcctgccctgccaggctt

SEQ ID NO: 1208 - RNA, 19 nt, synthetic construct
  misc_feature 1..19: note = Description of Artificial Sequence: Synthetic oligonucleotide
  source 1..19: mol_type = other RNA
gcctgccctgccaggcttg

SEQ ID NO: 1209 - RNA, 19 nt, synthetic construct
  misc_feature 1..19: note = Description of Artificial Sequence: Synthetic oligonucleotide
  source 1..19: mol_type = other RNA
cctgccctgccaggcttgg

SEQ ID NO: 1210 - RNA, 19 nt, synthetic construct
  misc_feature 1..19: note = Description of Artificial Sequence: Synthetic oligonucleotide
  source 1..19: mol_type = other RNA
ctgccctgccaggcttgga

SEQ ID NO: 1211 - RNA, 19 nt, synthetic construct
  misc_feature 1..19: note = Description of Artificial Sequence: Synthetic oligonucleotide
  source 1..19: mol_type = other RNA
tgccctgccaggcttggag

SEQ ID NO: 1212 - RNA, 19 nt, synthetic construct
  misc_feature 1..19: note = Description of Artificial Sequence: Synthetic oligonucleotide
  source 1..19: mol_type = other RNA
gccctgccaggcttggagc

SEQ ID NO: 1213 - RNA, 19 nt, synthetic construct
  misc_feature 1..19: note = Description of Artificial Sequence: Synthetic oligonucleotide
  source 1..19: mol_type = other RNA
ccctgccaggcttggagcc

SEQ ID NO: 1214 - RNA, 19 nt, synthetic construct
  misc_feature 1..19: note = Description of Artificial Sequence: Synthetic oligonucleotide
  source 1..19: mol_type = other RNA
cctgccaggcttggagcca

SEQ ID NO: 1215 - RNA, 19 nt, synthetic construct
  misc_feature 1..19: note = Description of Artificial Sequence: Synthetic oligonucleotide
  source 1..19: mol_type = other RNA
ctgccaggcttggagccac

SEQ ID NO: 1216 - RNA, 19 nt, synthetic construct
  misc_feature 1..19: note = Description of Artificial Sequence: Synthetic oligonucleotide
  source 1..19: mol_type = other RNA
tgccaggcttggagccaca

SEQ ID NO: 1217 - RNA, 19 nt, synthetic construct
  misc_feature 1..19: note = Description of Artificial Sequence: Synthetic oligonucleotide
  source 1..19: mol_type = other RNA
gccaggcttggagccacaa

SEQ ID NO: 1218 - RNA, 19 nt, synthetic construct
  misc_feature 1..19: note = Description of Artificial Sequence: Synthetic oligonucleotide
  source 1..19: mol_type = other RNA
ccaggcttggagccacaag

SEQ ID NO: 1219 - RNA, 19 nt, synthetic construct
  misc_feature 1..19: note = Description of Artificial Sequence: Synthetic oligonucleotide
  source 1..19: mol_type = other RNA
caggcttggagccacaagt

SEQ ID NO: 1220 - RNA, 19 nt, synthetic construct
  misc_feature 1..19: note = Description of Artificial Sequence: Synthetic oligonucleotide
  source 1..19: mol_type = other RNA
aggcttggagccacaagtt

SEQ ID NO: 1221 - RNA, 19 nt, synthetic construct
  misc_feature 1..19: note = Description of Artificial Sequence: Synthetic oligonucleotide
  source 1..19: mol_type = other RNA
ggcttggagccacaagttc

SEQ ID NO: 1222 - RNA, 19 nt, synthetic construct
  misc_feature 1..19: note = Description of Artificial Sequence: Synthetic oligonucleotide
  source 1..19: mol_type = other RNA
gcttggagccacaagttcc

SEQ ID NO: 1223 - RNA, 19 nt, synthetic construct
  misc_feature 1..19: note = Description of Artificial Sequence: Synthetic oligonucleotide
  source 1..19: mol_type = other RNA
cttggagccacaagttccc

SEQ ID NO: 1224 - RNA, 19 nt, synthetic construct
  misc_feature 1..19: note = Description of Artificial Sequence: Synthetic oligonucleotide
  source 1..19: mol_type = other RNA
ttggagccacaagttccca

SEQ ID NO: 1225 - RNA, 19 nt, synthetic construct
  misc_feature 1..19: note = Description of Artificial Sequence: Synthetic oligonucleotide
  source 1..19: mol_type = other RNA
tggagccacaagttcccaa

SEQ ID NO: 1226 - RNA, 19 nt, synthetic construct
  misc_feature 1..19: note = Description of Artificial Sequence: Synthetic oligonucleotide
  source 1..19: mol_type = other RNA
ggagccacaagttcccaaa

SEQ ID NO: 1227 - RNA, 19 nt, synthetic construct
  misc_feature 1..19: note = Description of Artificial Sequence: Synthetic oligonucleotide
  source 1..19: mol_type = other RNA
gagccacaagttcccaaat

SEQ ID NO: 1228 - RNA, 19 nt, synthetic construct
  misc_feature 1..19: note = Description of Artificial Sequence: Synthetic oligonucleotide
  source 1..19: mol_type = other RNA
agccacaagttcccaaatg

SEQ ID NO: 1229 - RNA, 19 nt, synthetic construct
  misc_feature 1..19: note = Description of Artificial Sequence: Synthetic oligonucleotide
  source 1..19: mol_type = other RNA
gccacaagttcccaaatga

SEQ ID NO: 1230 - RNA, 19 nt, synthetic construct
  misc_feature 1..19: note = Description of Artificial Sequence: Synthetic oligonucleotide
  source 1..19: mol_type = other RNA
ccacaagttcccaaatgat

SEQ ID NO: 1231 - RNA, 19 nt, synthetic construct
  misc_feature 1..19: note = Description of Artificial Sequence: Synthetic oligonucleotide
  source 1..19: mol_type = other RNA
cacaagttcccaaatgatc

SEQ ID NO: 1232 - RNA, 19 nt, synthetic construct
  misc_feature 1..19: note = Description of Artificial Sequence: Synthetic oligonucleotide
  source 1..19: mol_type = other RNA
acaagttcccaaatgatca

SEQ ID NO: 1233 - RNA, 19 nt, synthetic construct
  misc_feature 1..19: note = Description of Artificial Sequence: Synthetic oligonucleotide
  source 1..19: mol_type = other RNA
caagttcccaaatgatcac

SEQ ID NO: 1234 - RNA, 19 nt, synthetic construct
  misc_feature 1..19: note = Description of Artificial Sequence: Synthetic oligonucleotide
  source 1..19: mol_type = other RNA
aagttcccaaatgatcaca

SEQ ID NO: 1235 - RNA, 19 nt, synthetic construct
  misc_feature 1..19: note = Description of Artificial Sequence: Synthetic oligonucleotide
  source 1..19: mol_type = other RNA
agttcccaaatgatcacaa

SEQ ID NO: 1236 - RNA, 19 nt, synthetic construct
  misc_feature 1..19: note = Description of Artificial Sequence: Synthetic oligonucleotide
  source 1..19: mol_type = other RNA
gttcccaaatgatcacaag

SEQ ID NO: 1237 - RNA, 19 nt, synthetic construct
  misc_feature 1..19: note = Description of Artificial Sequence: Synthetic oligonucleotide
  source 1..19: mol_type = other RNA
ttcccaaatgatcacaagt

SEQ ID NO: 1238 - RNA, 19 nt, synthetic construct
  misc_feature 1..19: note = Description of Artificial Sequence: Synthetic oligonucleotide
  source 1..19: mol_type = other RNA
tcccaaatgatcacaagta

SEQ ID NO: 1239 - RNA, 19 nt, synthetic construct
  misc_feature 1..19: note = Description of Artificial Sequence: Synthetic oligonucleotide
  source 1..19: mol_type = other RNA
cccaaatgatcacaagtac

SEQ ID NO: 1240 - RNA, 19 nt, synthetic construct
  misc_feature 1..19: note = Description of Artificial Sequence: Synthetic oligonucleotide
  source 1..19: mol_type = other RNA
ccaaatgatcacaagtaca

SEQ ID NO: 1241 - RNA, 19 nt, synthetic construct
  misc_feature 1..19: note = Description of Artificial Sequence: Synthetic oligonucleotide
  source 1..19: mol_type = other RNA
caaatgatcacaagtacac

SEQ ID NO: 1242 - RNA, 19 nt, synthetic construct
  misc_feature 1..19: note = Description of Artificial Sequence: Synthetic oligonucleotide
  source 1..19: mol_type = other RNA
aaatgatcacaagtacacg

SEQ ID NO: 1243 - RNA, 19 nt, synthetic construct
  misc_feature 1..19: note = Description of Artificial Sequence: Synthetic oligonucleotide
  source 1..19: mol_type = other RNA
aatgatcacaagtacacgc

SEQ ID NO: 1244 - RNA, 19 nt, synthetic construct
  misc_feature 1..19: note = Description of Artificial Sequence: Synthetic oligonucleotide
  source 1..19: mol_type = other RNA
atgatcacaagtacacgcc

SEQ ID NO: 1245 - RNA, 19 nt, synthetic construct
  misc_feature 1..19: note = Description of Artificial Sequence: Synthetic oligonucleotide
  source 1..19: mol_type = other RNA
tgatcacaagtacacgccc

SEQ ID NO: 1246 - RNA, 19 nt, synthetic construct
  misc_feature 1..19: note = Description of Artificial Sequence: Synthetic oligonucleotide
  source 1..19: mol_type = other RNA
gatcacaagtacacgccca

SEQ ID NO: 1247 - RNA, 19 nt, synthetic construct
  misc_feature 1..19: note = Description of Artificial Sequence: Synthetic oligonucleotide
  source 1..19: mol_type = other RNA
atcacaagtacacgcccac

SEQ ID NO: 1248 - RNA, 19 nt, synthetic construct
  misc_feature 1..19: note = Description of Artificial Sequence: Synthetic oligonucleotide
  source 1..19: mol_type = other RNA
tcacaagtacacgcccact

SEQ ID NO: 1249 - RNA, 19 nt, synthetic construct
  misc_feature 1..19: note = Description of Artificial Sequence: Synthetic oligonucleotide
  source 1..19: mol_type = other RNA
cacaagtacacgcccactc

SEQ ID NO: 1250 - RNA, 19 nt, synthetic construct
  misc_feature 1..19: note = Description of Artificial Sequence: Synthetic oligonucleotide
  source 1..19: mol_type = other RNA
acaagtacacgcccactct

SEQ ID NO: 1251 - RNA, 19 nt, synthetic construct
  misc_feature 1..19: note = Description of Artificial Sequence: Synthetic oligonucleotide
  source 1..19: mol_type = other RNA
caagtacacgcccactctc

SEQ ID NO: 1252 - RNA, 19 nt, synthetic construct
  misc_feature 1..19: note = Description of Artificial Sequence: Synthetic oligonucleotide
  source 1..19: mol_type = other RNA
aagtacacgcccactctcc

SEQ ID NO: 1253 - RNA, 19 nt, synthetic construct
  misc_feature 1..19: note = Description of Artificial Sequence: Synthetic oligonucleotide
  source 1..19: mol_type = other RNA
agtacacgcccactctccg

SEQ ID NO: 1254 - RNA, 19 nt, synthetic construct
  misc_feature 1..19: note = Description of Artificial Sequence: Synthetic oligonucleotide
  source 1..19: mol_type = other RNA
gtacacgcccactctccgg

SEQ ID NO: 1255 - RNA, 19 nt, synthetic construct
  misc_feature 1..19: note = Description of Artificial Sequence: Synthetic oligonucleotide
  source 1..19: mol_type = other RNA
tacacgcccactctccgga

SEQ ID NO: 1256 - RNA, 19 nt, synthetic construct
  misc_feature 1..19: note = Description of Artificial Sequence: Synthetic oligonucleotide
  source 1..19: mol_type = other RNA
acacgcccactctccggaa

SEQ ID NO: 1257 - RNA, 19 nt, synthetic construct
  misc_feature 1..19: note = Description of Artificial Sequence: Synthetic oligonucleotide
  source 1..19: mol_type = other RNA
cacgcccactctccggaat

SEQ ID NO: 1258 - RNA, 19 nt, synthetic construct
  misc_feature 1..19: note = Description of Artificial Sequence: Synthetic oligonucleotide
  source 1..19: mol_type = other RNA
acgcccactctccggaatg

SEQ ID NO: 1259 - RNA, 19 nt, synthetic construct
  misc_feature 1..19: note = Description of Artificial Sequence: Synthetic oligonucleotide
  source 1..19: mol_type = other RNA
cgcccactctccggaatgg

SEQ ID NO: 1260 - RNA, 19 nt, synthetic construct
  misc_feature 1..19: note = Description of Artificial Sequence: Synthetic oligonucleotide
  source 1..19: mol_type = other RNA
gcccactctccggaatggc

SEQ ID NO: 1261 - RNA, 19 nt, synthetic construct
  misc_feature 1..19: note = Description of Artificial Sequence: Synthetic oligonucleotide
  source 1..19: mol_type = other RNA
cccactctccggaatggcc

SEQ ID NO: 1262 - RNA, 19 nt, synthetic construct
  misc_feature 1..19: note = Description of Artificial Sequence: Synthetic oligonucleotide
  source 1..19: mol_type = other RNA
ccactctccggaatggcct

SEQ ID NO: 1263 - RNA, 19 nt, synthetic construct
  misc_feature 1..19: note = Description of Artificial Sequence: Synthetic oligonucleotide
  source 1..19: mol_type = other RNA
cactctccggaatggcctg

SEQ ID NO: 1264 - RNA, 19 nt, synthetic construct
  misc_feature 1..19: note = Description of Artificial Sequence: Synthetic oligonucleotide
  source 1..19: mol_type = other RNA
actctccggaatggcctgg

SEQ ID NO: 1265 - RNA, 19 nt, synthetic construct
  misc_feature 1..19: note = Description of Artificial Sequence: Synthetic oligonucleotide
  source 1..19: mol_type = other RNA
ctctccggaatggcctgga

SEQ ID NO: 1266 - RNA, 19 nt, synthetic construct
  misc_feature 1..19: note = Description of Artificial Sequence: Synthetic oligonucleotide
  source 1..19: mol_type = other RNA
tctccggaatggcctggaa

SEQ ID NO: 1267 - RNA, 19 nt, synthetic construct
  misc_feature 1..19: note = Description of Artificial Sequence: Synthetic oligonucleotide
  source 1..19: mol_type = other RNA
ctccggaatggcctggaag

SEQ ID NO: 1268 - RNA, 19 nt, synthetic construct
  misc_feature 1..19: note = Description of Artificial Sequence: Synthetic oligonucleotide
  source 1..19: mol_type = other RNA
tccggaatggcctggaaga

SEQ ID NO: 1269 - RNA, 19 nt, synthetic construct
  misc_feature 1..19: note = Description of Artificial Sequence: Synthetic oligonucleotide
  source 1..19: mol_type = other RNA
ccggaatggcctggaagag

SEQ ID NO: 1270 - RNA, 19 nt, synthetic construct
  misc_feature 1..19: note = Description of Artificial Sequence: Synthetic oligonucleotide
  source 1..19: mol_type = other RNA
cggaatggcctggaagaga

SEQ ID NO: 1271 - RNA, 19 nt, synthetic construct
  misc_feature 1..19: note = Description of Artificial Sequence: Synthetic oligonucleotide
  source 1..19: mol_type = other RNA
ggaatggcctggaagagaa

SEQ ID NO: 1272 - RNA, 19 nt, synthetic construct
  misc_feature 1..19: note = Description of Artificial Sequence: Synthetic oligonucleotide
  source 1..19: mol_type = other RNA
gaatggcctggaagagaac

SEQ ID NO: 1273 - RNA, 19 nt, synthetic construct
  misc_feature 1..19: note = Description of Artificial Sequence: Synthetic oligonucleotide
  source 1..19: mol_type = other RNA
aatggcctggaagagaact

SEQ ID NO: 1274 - RNA, 19 nt, synthetic construct
  misc_feature 1..19: note = Description of Artificial Sequence: Synthetic oligonucleotide
  source 1..19: mol_type = other RNA
atggcctggaagagaactt

SEQ ID NO: 1275 - RNA, 19 nt, synthetic construct
  misc_feature 1..19: note = Description of Artificial Sequence: Synthetic oligonucleotide
  source 1..19: mol_type = other RNA
tggcctggaagagaacttc

SEQ ID NO: 1276 - RNA, 19 nt, synthetic construct
  misc_feature 1..19: note = Description of Artificial Sequence: Synthetic oligonucleotide
  source 1..19: mol_type = other RNA
ggcctggaagagaacttct

SEQ ID NO: 1277 - RNA, 19 nt, synthetic construct
  misc_feature 1..19: note = Description of Artificial Sequence: Synthetic oligonucleotide
  source 1..19: mol_type = other RNA
gcctggaagagaacttctg

SEQ ID NO: 1278 - RNA, 19 nt, synthetic construct
  misc_feature 1..19: note = Description of Artificial Sequence: Synthetic oligonucleotide
  source 1..19: mol_type = other RNA
cctggaagagaacttctgc

SEQ ID NO: 1279 - RNA, 19 nt, synthetic construct
  misc_feature 1..19: note = Description of Artificial Sequence: Synthetic oligonucleotide
  source 1..19: mol_type = other RNA
ctggaagagaacttctgcc

SEQ ID NO: 1280 - RNA, 19 nt, synthetic construct
  misc_feature 1..19: note = Description of Artificial Sequence: Synthetic oligonucleotide
  source 1..19: mol_type = other RNA
tggaagagaacttctgccg

SEQ ID NO: 1281 - RNA, 19 nt, synthetic construct
  misc_feature 1..19: note = Description of Artificial Sequence: Synthetic oligonucleotide
  source 1..19: mol_type = other RNA
ggaagagaacttctgccgt

SEQ ID NO: 1282 - RNA, 19 nt, synthetic construct
  misc_feature 1..19: note = Description of Artificial Sequence: Synthetic oligonucleotide
  source 1..19: mol_type = other RNA
gaagagaacttctgccgta

SEQ ID NO: 1283 - RNA, 19 nt, synthetic construct
  misc_feature 1..19: note = Description of Artificial Sequence: Synthetic oligonucleotide
  source 1..19: mol_type = other RNA
aagagaacttctgccgtaa

SEQ ID NO: 1284 - RNA, 19 nt, synthetic construct
  misc_feature 1..19: note = Description of Artificial Sequence: Synthetic oligonucleotide
  source 1..19: mol_type = other RNA
agagaacttctgccgtaac

SEQ ID NO: 1285 - RNA, 19 nt, synthetic construct
  misc_feature 1..19: note = Description of Artificial Sequence: Synthetic oligonucleotide
  source 1..19: mol_type = other RNA
gagaacttctgccgtaacc

SEQ ID NO: 1286 - RNA, 19 nt, synthetic construct
  misc_feature 1..19: note = Description of Artificial Sequence: Synthetic oligonucleotide
  source 1..19: mol_type = other RNA
agaacttctgccgtaaccc

SEQ ID NO: 1287 - RNA, 19 nt, synthetic construct
  misc_feature 1..19: note = Description of Artificial Sequence: Synthetic oligonucleotide
  source 1..19: mol_type = other RNA
gaacttctgccgtaaccct

SEQ ID NO: 1288 - RNA, 19 nt, synthetic construct
  misc_feature 1..19: note = Description of Artificial Sequence: Synthetic oligonucleotide
  source 1..19: mol_type = other RNA
aacttctgccgtaaccctg

SEQ ID NO: 1289 - RNA, 19 nt, synthetic construct
  misc_feature 1..19: note = Description of Artificial Sequence: Synthetic oligonucleotide
  source 1..19: mol_type = other RNA
acttctgccgtaaccctga

SEQ ID NO: 1290 - RNA, 19 nt, synthetic construct
  misc_feature 1..19: note = Description of Artificial Sequence: Synthetic oligonucleotide
  source 1..19: mol_type = other RNA
cttctgccgtaaccctgat

SEQ ID NO: 1291 - RNA, 19 nt, synthetic construct
  misc_feature 1..19: note = Description of Artificial Sequence: Synthetic oligonucleotide
  source 1..19: mol_type = other RNA
ttctgccgtaaccctgatg

SEQ ID NO: 1292 - RNA, 19 nt, synthetic construct
  misc_feature 1..19: note = Description of Artificial Sequence: Synthetic oligonucleotide
  source 1..19: mol_type = other RNA
tctgccgtaaccctgatgg

SEQ ID NO: 1293 - RNA, 19 nt, synthetic construct
  misc_feature 1..19: note = Description of Artificial Sequence: Synthetic oligonucleotide
  source 1..19: mol_type = other RNA
ctgccgtaaccctgatggc

SEQ ID NO: 1294 - RNA, 19 nt, synthetic construct
  misc_feature 1..19: note = Description of Artificial Sequence: Synthetic oligonucleotide
  source 1..19: mol_type = other RNA
tgccgtaaccctgatggcg

SEQ ID NO: 1295 - RNA, 19 nt, synthetic construct
  misc_feature 1..19: note = Description of Artificial Sequence: Synthetic oligonucleotide
  source 1..19: mol_type = other RNA
gccgtaaccctgatggcga

SEQ ID NO: 1296 - RNA, 19 nt, synthetic construct
  misc_feature 1..19: note = Description of Artificial Sequence: Synthetic oligonucleotide
  source 1..19: mol_type = other RNA
ccgtaaccctgatggcgac

SEQ ID NO: 1297 - RNA, 19 nt, synthetic construct
  misc_feature 1..19: note = Description of Artificial Sequence: Synthetic oligonucleotide
  source 1..19: mol_type = other RNA
cgtaaccctgatggcgacc

SEQ ID NO: 1298 - RNA, 19 nt, synthetic construct
  misc_feature 1..19: note = Description of Artificial Sequence: Synthetic oligonucleotide
  source 1..19: mol_type = other RNA
gtaaccctgatggcgaccc

SEQ ID NO: 1299 - RNA, 19 nt, synthetic construct
  misc_feature 1..19: note = Description of Artificial Sequence: Synthetic oligonucleotide
  source 1..19: mol_type = other RNA
taaccctgatggcgacccc

SEQ ID NO: 1300 - RNA, 19 nt, synthetic construct
  misc_feature 1..19: note = Description of Artificial Sequence: Synthetic oligonucleotide
  source 1..19: mol_type = other RNA
aaccctgatggcgaccccg

SEQ ID NO: 1301 - RNA, 19 nt, synthetic construct
  misc_feature 1..19: note = Description of Artificial Sequence: Synthetic oligonucleotide
  source 1..19: mol_type = other RNA
accctgatggcgaccccgg

SEQ ID NO: 1302 - RNA, 19 nt, synthetic construct
  misc_feature 1..19: note = Description of Artificial Sequence: Synthetic oligonucleotide
  source 1..19: mol_type = other RNA
ccctgatggcgaccccgga

SEQ ID NO: 1303 - RNA, 19 nt, synthetic construct
  misc_feature 1..19: note = Description of Artificial Sequence: Synthetic oligonucleotide
  source 1..19: mol_type = other RNA
cctgatggcgaccccggag

SEQ ID NO: 1304 - RNA, 19 nt, synthetic construct
  misc_feature 1..19: note = Description of Artificial Sequence: Synthetic oligonucleotide
  source 1..19: mol_type = other RNA
ctgatggcgaccccggagg

SEQ ID NO: 1305 - RNA, 19 nt, synthetic construct
  misc_feature 1..19: note = Description of Artificial Sequence: Synthetic oligonucleotide
  source 1..19: mol_type = other RNA
tgatggcgaccccggaggt

SEQ ID NO: 1306 - RNA, 19 nt, synthetic construct
  misc_feature 1..19: note = Description of Artificial Sequence: Synthetic oligonucleotide
  source 1..19: mol_type = other RNA
gatggcgaccccggaggtc

SEQ ID NO: 1307 - RNA, 19 nt, synthetic construct
  misc_feature 1..19: note = Description of Artificial Sequence: Synthetic oligonucleotide
  source 1..19: mol_type = other RNA
atggcgaccccggaggtcc

SEQ ID NO: 1308 - RNA, 19 nt, synthetic construct
  misc_feature 1..19: note = Description of Artificial Sequence: Synthetic oligonucleotide
  source 1..19: mol_type = other RNA
tggcgaccccggaggtcct

SEQ ID NO: 1309 - RNA, 19 nt, synthetic construct
  misc_feature 1..19: note = Description of Artificial Sequence: Synthetic oligonucleotide
  source 1..19: mol_type = other RNA
ggcgaccccggaggtcctt

SEQ ID NO: 1310 - RNA, 19 nt, synthetic construct
  misc_feature 1..19: note = Description of Artificial Sequence: Synthetic oligonucleotide
  source 1..19: mol_type = other RNA
gcgaccccggaggtccttg

SEQ ID NO: 1311 - RNA, 19 nt, synthetic construct
  misc_feature 1..19: note = Description of Artificial Sequence: Synthetic oligonucleotide
  source 1..19: mol_type = other RNA
cgaccccggaggtccttgg

SEQ ID NO: 1312 - RNA, 19 nt, synthetic construct
  misc_feature 1..19: note = Description of Artificial Sequence: Synthetic oligonucleotide
  source 1..19: mol_type = other RNA
gaccccggaggtccttggt

SEQ ID NO: 1313 - RNA, 19 nt, synthetic construct
  misc_feature 1..19: note = Description of Artificial Sequence: Synthetic oligonucleotide
  source 1..19: mol_type = other RNA
accccggaggtccttggtg

SEQ ID NO: 1314 - RNA, 19 nt, synthetic construct
  misc_feature 1..19: note = Description of Artificial Sequence: Synthetic oligonucleotide
  source 1..19: mol_type = other RNA
ccccggaggtccttggtgc

SEQ ID NO: 1315 - RNA, 19 nt, synthetic construct
  misc_feature 1..19: note = Description of Artificial Sequence: Synthetic oligonucleotide
  source 1..19: mol_type = other RNA
cccggaggtccttggtgct

SEQ ID NO: 1316 - RNA, 19 nt, synthetic construct
  misc_feature 1..19: note = Description of Artificial Sequence: Synthetic oligonucleotide
  source 1..19: mol_type = other RNA
ccggaggtccttggtgcta

SEQ ID NO: 1317 - RNA, 19 nt, synthetic construct
  misc_feature 1..19: note = Description of Artificial Sequence: Synthetic oligonucleotide
  source 1..19: mol_type = other RNA
cggaggtccttggtgctac

SEQ ID NO: 1318 - RNA, 19 nt, synthetic construct
  misc_feature 1..19: note = Description of Artificial Sequence: Synthetic oligonucleotide
  source 1..19: mol_type = other RNA
ggaggtccttggtgctaca

SEQ ID NO: 1319 - RNA, 19 nt, synthetic construct
  misc_feature 1..19: note = Description of Artificial Sequence: Synthetic oligonucleotide
  source 1..19: mol_type = other RNA
gaggtccttggtgctacac

SEQ ID NO: 1320 - RNA, 19 nt, synthetic construct
  misc_feature 1..19: note = Description of Artificial Sequence: Synthetic oligonucleotide
  source 1..19: mol_type = other RNA
aggtccttggtgctacaca

SEQ ID NO: 1321 - RNA, 19 nt, synthetic construct
  misc_feature 1..19: note = Description of Artificial Sequence: Synthetic oligonucleotide
  source 1..19: mol_type = other RNA
ggtccttggtgctacacaa

SEQ ID NO: 1322 - RNA, 19 nt, synthetic construct
  misc_feature 1..19: note = Description of Artificial Sequence: Synthetic oligonucleotide
  source 1..19: mol_type = other RNA
gtccttggtgctacacaac

SEQ ID NO: 1323 - RNA, 19 nt, synthetic construct
  misc_feature 1..19: note = Description of Artificial Sequence: Synthetic oligonucleotide
  source 1..19: mol_type = other RNA
tccttggtgctacacaaca

SEQ ID NO: 1324 - RNA, 19 nt, synthetic construct
  misc_feature 1..19: note = Description of Artificial Sequence: Synthetic oligonucleotide
  source 1..19: mol_type = other RNA
ccttggtgctacacaacag

SEQ ID NO: 1325 - RNA, 19 nt, synthetic construct
  misc_feature 1..19: note = Description of Artificial Sequence: Synthetic oligonucleotide
  source 1..19: mol_type = other RNA
cttggtgctacacaacaga

SEQ ID NO: 1326 - RNA, 19 nt, synthetic construct
  misc_feature 1..19: note = Description of Artificial Sequence: Synthetic oligonucleotide
  source 1..19: mol_type = other RNA
ttggtgctacacaacagac

SEQ ID NO: 1327 - RNA, 19 nt, synthetic construct
  misc_feature 1..19: note = Description of Artificial Sequence: Synthetic oligonucleotide
  source 1..19: mol_type = other RNA
tggtgctacacaacagacc

SEQ ID NO: 1328 - RNA, 19 nt, synthetic construct
  misc_feature 1..19: note = Description of Artificial Sequence: Synthetic oligonucleotide
  source 1..19: mol_type = other RNA
ggtgctacacaacagaccc

SEQ ID NO: 1329 - RNA, 19 nt, synthetic construct
  misc_feature 1..19: note = Description of Artificial Sequence: Synthetic oligonucleotide
  source 1..19: mol_type = other RNA
gtgctacacaacagaccct

SEQ ID NO: 1330 - RNA, 19 nt, synthetic construct
  misc_feature 1..19: note = Description of Artificial Sequence: Synthetic oligonucleotide
  source 1..19: mol_type = other RNA
tgctacacaacagaccctg

SEQ ID NO: 1331 - RNA, 19 nt, synthetic construct
  misc_feature 1..19: note = Description of Artificial Sequence: Synthetic oligonucleotide
  source 1..19: mol_type = other RNA
gctacacaacagaccctgc

SEQ ID NO: 1332 - RNA, 19 nt, synthetic construct
  misc_feature 1..19: note = Description of Artificial Sequence: Synthetic oligonucleotide
  source 1..19: mol_type = other RNA
ctacacaacagaccctgct

SEQ ID NO: 1333 - RNA, 19 nt, synthetic construct
  misc_feature 1..19: note = Description of Artificial Sequence: Synthetic oligonucleotide
  source 1..19: mol_type = other RNA
tacacaacagaccctgctg

SEQ ID NO: 1334 - RNA, 19 nt, synthetic construct
  misc_feature 1..19: note = Description of Artificial Sequence: Synthetic oligonucleotide
  source 1..19: mol_type = other RNA
acacaacagaccctgctgt

SEQ ID NO: 1335 - RNA, 19 nt, synthetic construct
  misc_feature 1..19: note = Description of Artificial Sequence: Synthetic oligonucleotide
  source 1..19: mol_type = other RNA
cacaacagaccctgctgtg

SEQ ID NO: 1336 - RNA, 19 nt, synthetic construct
  misc_feature 1..19: note = Description of Artificial Sequence: Synthetic oligonucleotide
  source 1..19: mol_type = other RNA
acaacagaccctgctgtgc

SEQ ID NO: 1337 - RNA, 19 nt, synthetic construct
  misc_feature 1..19: note = Description of Artificial Sequence: Synthetic oligonucleotide
  source 1..19: mol_type = other RNA
caacagaccctgctgtgcg

SEQ ID NO: 1338 - RNA, 19 nt, synthetic construct
  misc_feature 1..19: note = Description of Artificial Sequence: Synthetic oligonucleotide
  source 1..19: mol_type = other RNA
aacagaccctgctgtgcgc

SEQ ID NO: 1339 - RNA, 19 nt, synthetic construct
  misc_feature 1..19: note = Description of Artificial Sequence: Synthetic oligonucleotide
  source 1..19: mol_type = other RNA
acagaccctgctgtgcgct

SEQ ID NO: 1340 - RNA, 19 nt, synthetic construct
  misc_feature 1..19: note = Description of Artificial Sequence: Synthetic oligonucleotide
  source 1..19: mol_type = other RNA
cagaccctgctgtgcgctt

SEQ ID NO: 1341 - RNA, 19 nt, synthetic construct
  misc_feature 1..19: note = Description of Artificial Sequence: Synthetic oligonucleotide
  source 1..19: mol_type = other RNA
agaccctgctgtgcgcttc

SEQ ID NO: 1342 - RNA, 19 nt, synthetic construct
  misc_feature 1..19: note = Description of Artificial Sequence: Synthetic oligonucleotide
  source 1..19: mol_type = other RNA
gaccctgctgtgcgcttcc

SEQ ID NO: 1343 - RNA, 19 nt, synthetic construct
  misc_feature 1..19: note = Description of Artificial Sequence: Synthetic oligonucleotide
  source 1..19: mol_type = other RNA
accctgctgtgcgcttcca

SEQ ID NO: 1344 - RNA, 19 nt, synthetic construct
  misc_feature 1..19: note = Description of Artificial Sequence: Synthetic oligonucleotide
  source 1..19: mol_type = other RNA
ccctgctgtgcgcttccag

SEQ ID NO: 1345 - RNA, 19 nt, synthetic construct
  misc_feature 1..19: note = Description of Artificial Sequence: Synthetic oligonucleotide
  source 1..19: mol_type = other RNA
cctgctgtgcgcttccaga

SEQ ID NO: 1346 - RNA, 19 nt, synthetic construct
  misc_feature 1..19: note = Description of Artificial Sequence: Synthetic oligonucleotide
  source 1..19: mol_type = other RNA
ctgctgtgcgcttccagag

SEQ ID NO: 1347 - RNA, 19 nt, synthetic construct
  misc_feature 1..19: note = Description of Artificial Sequence: Synthetic oligonucleotide
  source 1..19: mol_type = other RNA
tgctgtgcgcttccagagc

SEQ ID NO: 1348 - RNA, 19 nt, synthetic construct
  misc_feature 1..19: note = Description of Artificial Sequence: Synthetic oligonucleotide
  source 1..19: mol_type = other RNA
gctgtgcgcttccagagct

SEQ ID NO: 1349 - RNA, 19 nt, synthetic construct
  misc_feature 1..19: note = Description of Artificial Sequence: Synthetic oligonucleotide
  source 1..19: mol_type = other RNA
ctgtgcgcttccagagctg

SEQ ID NO: 1350 - RNA, 19 nt, synthetic construct
  misc_feature 1..19: note = Description of Artificial Sequence: Synthetic oligonucleotide
  source 1..19: mol_type = other RNA
tgtgcgcttccagagctgc

SEQ ID NO: 1351 - RNA, 19 nt, synthetic construct
  misc_feature 1..19: note = Description of Artificial Sequence: Synthetic oligonucleotide
  source 1..19: mol_type = other RNA
gtgcgcttccagagctgcg

SEQ ID NO: 1352 - RNA, 19 nt, synthetic construct
  misc_feature 1..19: note = Description of Artificial Sequence: Synthetic oligonucleotide
  source 1..19: mol_type = other RNA
tgcgcttccagagctgcgg

SEQ ID NO: 1353 - RNA, 19 nt, synthetic construct
  misc_feature 1..19: note = Description of Artificial Sequence: Synthetic oligonucleotide
  source 1..19: mol_type = other RNA
gcgcttccagagctgcggc

SEQ ID NO: 1354 - RNA, 19 nt, synthetic construct
  misc_feature 1..19: note = Description of Artificial Sequence: Synthetic oligonucleotide
  source 1..19: mol_type = other RNA
cgcttccagagctgcggca

SEQ ID NO: 1355 - RNA, 19 nt, synthetic construct
  misc_feature 1..19: note = Description of Artificial Sequence: Synthetic oligonucleotide
  source 1..19: mol_type = other RNA
gcttccagagctgcggcat

SEQ ID NO: 1356 - RNA, 19 nt, synthetic construct
  misc_feature 1..19: note = Description of Artificial Sequence: Synthetic oligonucleotide
  source 1..19: mol_type = other RNA
cttccagagctgcggcatc

SEQ ID NO: 1357 - RNA, 19 nt, synthetic construct
  misc_feature 1..19: note = Description of Artificial Sequence: Synthetic oligonucleotide
  source 1..19: mol_type = other RNA
ttccagagctgcggcatca

SEQ ID NO: 1358 - RNA, 19 nt, synthetic construct
  misc_feature 1..19: note = Description of Artificial Sequence: Synthetic oligonucleotide
  source 1..19: mol_type = other RNA
tccagagctgcggcatcaa

SEQ ID NO: 1359 - RNA, 19 nt, synthetic construct
  misc_feature 1..19: note = Description of Artificial Sequence: Synthetic oligonucleotide
  source 1..19: mol_type = other RNA
ccagagctgcggcatcaaa

SEQ ID NO: 1360 - RNA, 19 nt, synthetic construct
  misc_feature 1..19: note = Description of Artificial Sequence: Synthetic oligonucleotide
  source 1..19: mol_type = other RNA
cagagctgcggcatcaaat

SEQ ID NO: 1361 - RNA, 19 nt, synthetic construct
  misc_feature 1..19: note = Description of Artificial Sequence: Synthetic oligonucleotide
  source 1..19: mol_type = other RNA
agagctgcggcatcaaatc

SEQ ID NO: 1362 - RNA, 19 nt, synthetic construct
  misc_feature 1..19: note = Description of Artificial Sequence: Synthetic oligonucleotide
  source 1..19: mol_type = other RNA
gagctgcggcatcaaatcc

SEQ ID NO: 1363 - RNA, 19 nt, synthetic construct
  misc_feature 1..19: note = Description of Artificial Sequence: Synthetic oligonucleotide
  source 1..19: mol_type = other RNA
agctgcggcatcaaatcct

SEQ ID NO: 1364 - RNA, 19 nt, synthetic construct
  misc_feature 1..19: note = Description of Artificial Sequence: Synthetic oligonucleotide
  source 1..19: mol_type = other RNA
gctgcggcatcaaatcctg

SEQ ID NO: 1365 - RNA, 19 nt, synthetic construct
  misc_feature 1..19: note = Description of Artificial Sequence: Synthetic oligonucleotide
  source 1..19: mol_type = other RNA
ctgcggcatcaaatcctgc

SEQ ID NO: 1366 - RNA, 19 nt, synthetic construct
  misc_feature 1..19: note = Description of Artificial Sequence: Synthetic oligonucleotide
  source 1..19: mol_type = other RNA
tgcggcatcaaatcctgcc

SEQ ID NO: 1367 - RNA, 19 nt, synthetic construct
  misc_feature 1..19: note = Description of Artificial Sequence: Synthetic oligonucleotide
  source 1..19: mol_type = other RNA
gcggcatcaaatcctgccg

SEQ ID NO: 1368 - RNA, 19 nt, synthetic construct
  misc_feature 1..19: note = Description of Artificial Sequence: Synthetic oligonucleotide
  source 1..19: mol_type = other RNA
cggcatcaaatcctgccgg

SEQ ID NO: 1369 - RNA, 19 nt, synthetic construct
  misc_feature 1..19: note = Description of Artificial Sequence: Synthetic oligonucleotide
  source 1..19: mol_type = other RNA
ggcatcaaatcctgccggg

SEQ ID NO: 1370 - RNA, 19 nt, synthetic construct
  misc_feature 1..19: note = Description of Artificial Sequence: Synthetic oligonucleotide
  source 1..19: mol_type = other RNA
gcatcaaatcctgccggga

SEQ ID NO: 1371 - RNA, 19 nt, synthetic construct
  misc_feature 1..19: note = Description of Artificial Sequence: Synthetic oligonucleotide
  source 1..19: mol_type = other RNA
catcaaatcctgccgggag

SEQ ID NO: 1372 - RNA, 19 nt, synthetic construct
  misc_feature 1..19: note = Description of Artificial Sequence: Synthetic oligonucleotide
  source 1..19: mol_type = other RNA
atcaaatcctgccgggagg

SEQ ID NO: 1373 - RNA, 19 nt, synthetic construct
  misc_feature 1..19: note = Description of Artificial Sequence: Synthetic oligonucleotide
  source 1..19: mol_type = other RNA
tcaaatcctgccgggaggc

SEQ ID NO: 1374 - RNA, 19 nt, synthetic construct
  misc_feature 1..19: note = Description of Artificial Sequence: Synthetic oligonucleotide
  source 1..19: mol_type = other RNA
caaatcctgccgggaggcc

SEQ ID NO: 1375 - RNA, 19 nt, synthetic construct
  misc_feature 1..19: note = Description of Artificial Sequence: Synthetic oligonucleotide
  source 1..19: mol_type = other RNA
aaatcctgccgggaggccg

SEQ ID NO: 1376 - RNA, 19 nt, synthetic construct
  misc_feature 1..19: note = Description of Artificial Sequence: Synthetic oligonucleotide
  source 1..19: mol_type = other RNA
aatcctgccgggaggccgc

SEQ ID NO: 1377 - RNA, 19 nt, synthetic construct
  misc_feature 1..19: note = Description of Artificial Sequence: Synthetic oligonucleotide
  source 1..19: mol_type = other RNA
atcctgccgggaggccgcg

SEQ ID NO: 1378 - RNA, 19 nt, synthetic construct
  misc_feature 1..19: note = Description of Artificial Sequence: Synthetic oligonucleotide
  source 1..19: mol_type = other RNA
tcctgccgggaggccgcgt

SEQ ID NO: 1379 - RNA, 19 nt, synthetic construct
  misc_feature 1..19: note = Description of Artificial Sequence: Synthetic oligonucleotide
  source 1..19: mol_type = other RNA
cctgccgggaggccgcgtg

SEQ ID NO: 1380 - RNA, 19 nt, synthetic construct
  misc_feature 1..19: note = Description of Artificial Sequence: Synthetic oligonucleotide
  source 1..19: mol_type = other RNA
ctgccgggaggccgcgtgt

SEQ ID NO: 1381 - RNA, 19 nt, synthetic construct
  misc_feature 1..19: note = Description of Artificial Sequence: Synthetic oligonucleotide
  source 1..19: mol_type = other RNA
tgccgggaggccgcgtgtg

SEQ ID NO: 1382 - RNA, 19 nt, synthetic construct
  misc_feature 1..19: note = Description of Artificial Sequence: Synthetic oligonucleotide
  source 1..19: mol_type = other RNA
gccgggaggccgcgtgtgt

SEQ ID NO: 1383 - RNA, 19 nt, synthetic construct
  misc_feature 1..19: note = Description of Artificial Sequence: Synthetic oligonucleotide
  source 1..19: mol_type = other RNA
ccgggaggccgcgtgtgtc

SEQ ID NO: 1384 - RNA, 19 nt, synthetic construct
  misc_feature 1..19: note = Description of Artificial Sequence: Synthetic oligonucleotide
  source 1..19: mol_type = other RNA
cgggaggccgcgtgtgtct

SEQ ID NO: 1385 - RNA, 19 nt, synthetic construct
  misc_feature 1..19: note = Description of Artificial Sequence: Synthetic oligonucleotide
  source 1..19: mol_type = other RNA
gggaggccgcgtgtgtctg

SEQ ID NO: 1386 - RNA, 19 nt, synthetic construct
  misc_feature 1..19: note = Description of Artificial Sequence: Synthetic oligonucleotide
  source 1..19: mol_type = other RNA
ggaggccgcgtgtgtctgg

SEQ ID NO: 1387 - RNA, 19 nt, synthetic construct
  misc_feature 1..19: note = Description of Artificial Sequence: Synthetic oligonucleotide
  source 1..19: mol_type = other RNA
gaggccgcgtgtgtctggt

SEQ ID NO: 1388 - RNA, 19 nt, synthetic construct
  misc_feature 1..19: note = Description of Artificial Sequence: Synthetic oligonucleotide
  source 1..19: mol_type = other RNA
aggccgcgtgtgtctggtg

SEQ ID NO: 1389 - RNA, 19 nt, synthetic construct
  misc_feature 1..19: note = Description of Artificial Sequence: Synthetic oligonucleotide
  source 1..19: mol_type = other RNA
ggccgcgtgtgtctggtgc

SEQ ID NO: 1390 - RNA, 19 nt, synthetic construct
  misc_feature 1..19: note = Description of Artificial Sequence: Synthetic oligonucleotide
  source 1..19: mol_type = other RNA
gccgcgtgtgtctggtgca

SEQ ID NO: 1391 - RNA, 19 nt, synthetic construct
  misc_feature 1..19: note = Description of Artificial Sequence: Synthetic oligonucleotide
  source 1..19: mol_type = other RNA
ccgcgtgtgtctggtgcaa

SEQ ID NO: 1392 - RNA, 19 nt, synthetic construct
  misc_feature 1..19: note = Description of Artificial Sequence: Synthetic oligonucleotide
  source 1..19: mol_type = other RNA
cgcgtgtgtctggtgcaat

SEQ ID NO: 1393 - RNA, 19 nt, synthetic construct
  misc_feature 1..19: note = Description of Artificial Sequence: Synthetic oligonucleotide
  source 1..19: mol_type = other RNA
gcgtgtgtctggtgcaatg

SEQ ID NO: 1394 - RNA, 19 nt, synthetic construct
  misc_feature 1..19: note = Description of Artificial Sequence: Synthetic oligonucleotide
  source 1..19: mol_type = other RNA
cgtgtgtctggtgcaatgg

SEQ ID NO: 1395 - RNA, 19 nt, synthetic construct
  misc_feature 1..19: note = Description of Artificial Sequence: Synthetic oligonucleotide
  source 1..19: mol_type = other RNA
gtgtgtctggtgcaatggc

SEQ ID NO: 1396 - RNA, 19 nt, synthetic construct
  misc_feature 1..19: note = Description of Artificial Sequence: Synthetic oligonucleotide
  source 1..19: mol_type = other RNA
tgtgtctggtgcaatggcg

SEQ ID NO: 1397 - RNA, 19 nt, synthetic construct
  misc_feature 1..19: note = Description of Artificial Sequence: Synthetic oligonucleotide
  source 1..19: mol_type = other RNA
gtgtctggtgcaatggcga

SEQ ID NO: 1398 - RNA, 19 nt, synthetic construct
  misc_feature 1..19: note = Description of Artificial Sequence: Synthetic oligonucleotide
  source 1..19: mol_type = other RNA
tgtctggtgcaatggcgag

SEQ ID NO: 1399 - RNA, 19 nt, synthetic construct
  misc_feature 1..19: note = Description of Artificial Sequence: Synthetic oligonucleotide
  source 1..19: mol_type = other RNA
gtctggtgcaatggcgagg

SEQ ID NO: 1400 - RNA, 19 nt, synthetic construct
  misc_feature 1..19: note = Description of Artificial Sequence: Synthetic oligonucleotide
  source 1..19: mol_type = other RNA
tctggtgcaatggcgagga

SEQ ID NO: 1401 - RNA, 19 nt, synthetic construct
  misc_feature 1..19: note = Description of Artificial Sequence: Synthetic oligonucleotide
  source 1..19: mol_type = other RNA
ctggtgcaatggcgaggaa

SEQ ID NO: 1402 - RNA, 19 nt, synthetic construct
  misc_feature 1..19: note = Description of Artificial Sequence: Synthetic oligonucleotide
  source 1..19: mol_type = other RNA
tggtgcaatggcgaggaat

SEQ ID NO: 1403 - RNA, 19 nt, synthetic construct
  misc_feature 1..19: note = Description of Artificial Sequence: Synthetic oligonucleotide
  source 1..19: mol_type = other RNA
ggtgcaatggcgaggaata

SEQ ID NO: 1404 - RNA, 19 nt, synthetic construct
  misc_feature 1..19: note = Description of Artificial Sequence: Synthetic oligonucleotide
  source 1..19: mol_type = other RNA
gtgcaatggcgaggaatac

SEQ ID NO: 1405 - RNA, 19 nt, synthetic construct
  misc_feature 1..19: note = Description of Artificial Sequence: Synthetic oligonucleotide
  source 1..19: mol_type = other RNA
tgcaatggcgaggaatacc

SEQ ID NO: 1406 - RNA, 19 nt, synthetic construct
  misc_feature 1..19: note = Description of Artificial Sequence: Synthetic oligonucleotide
  source 1..19: mol_type = other RNA
gcaatggcgaggaataccg

SEQ ID NO: 1407 - RNA, 19 nt, synthetic construct
  misc_feature 1..19: note = Description of Artificial Sequence: Synthetic oligonucleotide
  source 1..19: mol_type = other RNA
caatggcgaggaataccgc

SEQ ID NO: 1408 - RNA, 19 nt, synthetic construct
  misc_feature 1..19: note = Description of Artificial Sequence: Synthetic oligonucleotide
  source 1..19: mol_type = other RNA
aatggcgaggaataccgcg

SEQ ID NO: 1409 - RNA, 19 nt, synthetic construct
  misc_feature 1..19: note = Description of Artificial Sequence: Synthetic oligonucleotide
  source 1..19: mol_type = other RNA
atggcgaggaataccgcgg

SEQ ID NO: 1410 - RNA, 19 nt, synthetic construct
  misc_feature 1..19: note = Description of Artificial Sequence: Synthetic oligonucleotide
  source 1..19: mol_type = other RNA
tggcgaggaataccgcggc

SEQ ID NO: 1411 - RNA, 19 nt, synthetic construct
  misc_feature 1..19: note = Description of Artificial Sequence: Synthetic oligonucleotide
  source 1..19: mol_type = other RNA
ggcgaggaataccgcggcg

SEQ ID NO: 1412 - RNA, 19 nt, synthetic construct
  misc_feature 1..19: note = Description of Artificial Sequence: Synthetic oligonucleotide
  source 1..19: mol_type = other RNA
gcgaggaataccgcggcgc

SEQ ID NO: 1413 - RNA, 19 nt, synthetic construct
  misc_feature 1..19: note = Description of Artificial Sequence: Synthetic oligonucleotide
  source 1..19: mol_type = other RNA
cgaggaataccgcggcgcg

SEQ ID NO: 1414 - RNA, 19 nt, synthetic construct
  misc_feature 1..19: note = Description of Artificial Sequence: Synthetic oligonucleotide
  source 1..19: mol_type = other RNA
gaggaataccgcggcgcgg

SEQ ID NO: 1415 - RNA, 19 nt, synthetic construct
  misc_feature 1..19: note = Description of Artificial Sequence: Synthetic oligonucleotide
  source 1..19: mol_type = other RNA
aggaataccgcggcgcggt

SEQ ID NO: 1416 - RNA, 19 nt, synthetic construct
  misc_feature 1..19: note = Description of Artificial Sequence: Synthetic oligonucleotide
  source 1..19: mol_type = other RNA
ggaataccgcggcgcggta

SEQ ID NO: 1417 - RNA, 19 nt, synthetic construct
  misc_feature 1..19: note = Description of Artificial Sequence: Synthetic oligonucleotide
  source 1..19: mol_type = other RNA
gaataccgcggcgcggtag

SEQ ID NO: 1418 - RNA, 19 nt, synthetic construct
  misc_feature 1..19: note = Description of Artificial Sequence: Synthetic oligonucleotide
  source 1..19: mol_type = other RNA
aataccgcggcgcggtaga

SEQ ID NO: 1419 - RNA, 19 nt, synthetic construct
  misc_feature 1..19: note = Description of Artificial Sequence: Synthetic oligonucleotide
  source 1..19: mol_type = other RNA
ataccgcggcgcggtagac

SEQ ID NO: 1420 - RNA, 19 nt, synthetic construct
  misc_feature 1..19: note = Description of Artificial Sequence: Synthetic oligonucleotide
  source 1..19: mol_type = other RNA
taccgcggcgcggtagacc

SEQ ID NO: 1421 - RNA, 19 nt, synthetic construct
  misc_feature 1..19: note = Description of Artificial Sequence: Synthetic oligonucleotide
  source 1..19: mol_type = other RNA
accgcggcgcggtagaccg

SEQ ID NO: 1422 - RNA, 19 nt, synthetic construct
  misc_feature 1..19: note = Description of Artificial Sequence: Synthetic oligonucleotide
  source 1..19: mol_type = other RNA
ccgcggcgcggtagaccgc

SEQ ID NO: 1423 - RNA, 19 nt, synthetic construct
  misc_feature 1..19: note = Description of Artificial Sequence: Synthetic oligonucleotide
  source 1..19: mol_type = other RNA
cgcggcgcggtagaccgca

SEQ ID NO: 1424 - RNA, 19 nt, synthetic construct
  misc_feature 1..19: note = Description of Artificial Sequence: Synthetic oligonucleotide
  source 1..19: mol_type = other RNA
gcggcgcggtagaccgcac

SEQ ID NO: 1425 - RNA, 19 nt, synthetic construct
  misc_feature 1..19: note = Description of Artificial Sequence: Synthetic oligonucleotide
  source 1..19: mol_type = other RNA
cggcgcggtagaccgcacg

SEQ ID NO: 1426 - RNA, 19 nt, synthetic construct
  misc_feature 1..19: note = Description of Artificial Sequence: Synthetic oligonucleotide
  source 1..19: mol_type = other RNA
ggcgcggtagaccgcacgg

SEQ ID NO: 1427 - RNA, 19 nt, synthetic construct
  misc_feature 1..19: note = Description of Artificial Sequence: Synthetic oligonucleotide
  source 1..19: mol_type = other RNA
gcgcggtagaccgcacgga

SEQ ID NO: 1428 - RNA, 19 nt, synthetic construct
  misc_feature 1..19: note = Description of Artificial Sequence: Synthetic oligonucleotide
  source 1..19: mol_type = other RNA
cgcggtagaccgcacggag

SEQ ID NO: 1429 - RNA, 19 nt, synthetic construct
  misc_feature 1..19: note = Description of Artificial Sequence: Synthetic oligonucleotide
  source 1..19: mol_type = other RNA
gcggtagaccgcacggagt

SEQ ID NO: 1430 - RNA, 19 nt, synthetic construct
  misc_feature 1..19: note = Description of Artificial Sequence: Synthetic oligonucleotide
  source 1..19: mol_type = other RNA
cggtagaccgcacggagtc

SEQ ID NO: 1431 - RNA, 19 nt, synthetic construct
  misc_feature 1..19: note = Description of Artificial Sequence: Synthetic oligonucleotide
  source 1..19: mol_type = other RNA
ggtagaccgcacggagtca

SEQ ID NO: 1432 - RNA, 19 nt, synthetic construct
  misc_feature 1..19: note = Description of Artificial Sequence: Synthetic oligonucleotide
  source 1..19: mol_type = other RNA
gtagaccgcacggagtcag

SEQ ID NO: 1433 - RNA, 19 nt, synthetic construct
  misc_feature 1..19: note = Description of Artificial Sequence: Synthetic oligonucleotide
  source 1..19: mol_type = other RNA
tagaccgcacggagtcagg

SEQ ID NO: 1434 - RNA, 19 nt, synthetic construct
  misc_feature 1..19: note = Description of Artificial Sequence: Synthetic oligonucleotide
  source 1..19: mol_type = other RNA
agaccgcacggagtcaggg

SEQ ID NO: 1435 - RNA, 19 nt, synthetic construct
  misc_feature 1..19: note = Description of Artificial Sequence: Synthetic oligonucleotide
  source 1..19: mol_type = other RNA
gaccgcacggagtcagggc

SEQ ID NO: 1436 - RNA, 19 nt, synthetic construct
  misc_feature 1..19: note = Description of Artificial Sequence: Synthetic oligonucleotide
  source 1..19: mol_type = other RNA
accgcacggagtcagggcg

SEQ ID NO: 1437 - RNA, 19 nt, synthetic construct
  misc_feature 1..19: note = Description of Artificial Sequence: Synthetic oligonucleotide
  source 1..19: mol_type = other RNA
ccgcacggagtcagggcgc

SEQ ID NO: 1438 - RNA, 19 nt, synthetic construct
  misc_feature 1..19: note = Description of Artificial Sequence: Synthetic oligonucleotide
  source 1..19: mol_type = other RNA
cgcacggagtcagggcgcg

SEQ ID NO: 1439 - RNA, 19 nt, synthetic construct
  misc_feature 1..19: note = Description of Artificial Sequence: Synthetic oligonucleotide
  source 1..19: mol_type = other RNA
gcacggagtcagggcgcga

SEQ ID NO: 1440 - RNA, 19 nt, synthetic construct
  misc_feature 1..19: note = Description of Artificial Sequence: Synthetic oligonucleotide
  source 1..19: mol_type = other RNA
cacggagtcagggcgcgag

SEQ ID NO: 1441 - RNA, 19 nt, synthetic construct
  misc_feature 1..19: note = Description of Artificial Sequence: Synthetic oligonucleotide
  source 1..19: mol_type = other RNA
acggagtcagggcgcgagt

SEQ ID NO: 1442 - RNA, 19 nt, synthetic construct
  misc_feature 1..19: note = Description of Artificial Sequence: Synthetic oligonucleotide
  source 1..19: mol_type = other RNA
cggagtcagggcgcgagtg

SEQ ID NO: 1443 - RNA, 19 nt, synthetic construct
  misc_feature 1..19: note = Description of Artificial Sequence: Synthetic oligonucleotide
  source 1..19: mol_type = other RNA
ggagtcagggcgcgagtgc

SEQ ID NO: 1444 - RNA, 19 nt, synthetic construct
  misc_feature 1..19: note = Description of Artificial Sequence: Synthetic oligonucleotide
  source 1..19: mol_type = other RNA
gagtcagggcgcgagtgcc

SEQ ID NO: 1445 - RNA, 19 nt, synthetic construct
  misc_feature 1..19: note = Description of Artificial Sequence: Synthetic oligonucleotide
  source 1..19: mol_type = other RNA
agtcagggcgcgagtgcca

SEQ ID NO: 1446 - RNA, 19 nt, synthetic construct
  misc_feature 1..19: note = Description of Artificial Sequence: Synthetic oligonucleotide
  source 1..19: mol_type = other RNA
gtcagggcgcgagtgccag

SEQ ID NO: 1447 - RNA, 19 nt, synthetic construct
  misc_feature 1..19: note = Description of Artificial Sequence: Synthetic oligonucleotide
  source 1..19: mol_type = other RNA
tcagggcgcgagtgccagc

SEQ ID NO: 1448 - RNA, 19 nt, synthetic construct
  misc_feature 1..19: note = Description of Artificial Sequence: Synthetic oligonucleotide
  source 1..19: mol_type = other RNA
cagggcgcgagtgccagcg

SEQ ID NO: 1449 - RNA, 19 nt, synthetic construct
  misc_feature 1..19: note = Description of Artificial Sequence: Synthetic oligonucleotide
  source 1..19: mol_type = other RNA
agggcgcgagtgccagcgc

SEQ ID NO: 1450 - RNA, 19 nt, synthetic construct
  misc_feature 1..19: note = Description of Artificial Sequence: Synthetic oligonucleotide
  source 1..19: mol_type = other RNA
gggcgcgagtgccagcgct

SEQ ID NO: 1451 - RNA, 19 nt, synthetic construct
  misc_feature 1..19: note = Description of Artificial Sequence: Synthetic oligonucleotide
  source 1..19: mol_type = other RNA
ggcgcgagtgccagcgctg

SEQ ID NO: 1452 - RNA, 19 nt, synthetic construct
  misc_feature 1..19: note = Description of Artificial Sequence: Synthetic oligonucleotide
  source 1..19: mol_type = other RNA
gcgcgagtgccagcgctgg

SEQ ID NO: 1453 - RNA, 19 nt, synthetic construct
  misc_feature 1..19: note = Description of Artificial Sequence: Synthetic oligonucleotide
  source 1..19: mol_type = other RNA
cgcgagtgccagcgctggg

SEQ ID NO: 1454 - RNA, 19 nt, synthetic construct
  misc_feature 1..19: note = Description of Artificial Sequence: Synthetic oligonucleotide
  source 1..19: mol_type = other RNA
gcgagtgccagcgctggga

SEQ ID NO: 1455 - RNA, 19 nt, synthetic construct
  misc_feature 1..19: note = Description of Artificial Sequence: Synthetic oligonucleotide
  source 1..19: mol_type = other RNA
cgagtgccagcgctgggat

SEQ ID NO: 1456 - RNA, 19 nt, synthetic construct
  misc_feature 1..19: note = Description of Artificial Sequence: Synthetic oligonucleotide
  source 1..19: mol_type = other RNA
gagtgccagcgctgggatc

SEQ ID NO: 1457 - RNA, 19 nt, synthetic construct
  misc_feature 1..19: note = Description of Artificial Sequence: Synthetic oligonucleotide
  source 1..19: mol_type = other RNA
agtgccagcgctgggatct

SEQ ID NO: 1458 - RNA, 19 nt, synthetic construct
  misc_feature 1..19: note = Description of Artificial Sequence: Synthetic oligonucleotide
  source 1..19: mol_type = other RNA
gtgccagcgctgggatctt

SEQ ID NO: 1459 - RNA, 19 nt, synthetic construct
  misc_feature 1..19: note = Description of Artificial Sequence: Synthetic oligonucleotide
  source 1..19: mol_type = other RNA
tgccagcgctgggatcttc

SEQ ID NO: 1460 - RNA, 19 nt, synthetic construct
  misc_feature 1..19: note = Description of Artificial Sequence: Synthetic oligonucleotide
  source 1..19: mol_type = other RNA
gccagcgctgggatcttca

SEQ ID NO: 1461 - RNA, 19 nt, synthetic construct
  misc_feature 1..19: note = Description of Artificial Sequence: Synthetic oligonucleotide
  source 1..19: mol_type = other RNA
ccagcgctgggatcttcag

SEQ ID NO: 1462 - RNA, 19 nt, synthetic construct
  misc_feature 1..19: note = Description of Artificial Sequence: Synthetic oligonucleotide
  source 1..19: mol_type = other RNA
cagcgctgggatcttcagc

SEQ ID NO: 1463 - RNA, 19 nt, synthetic construct
  misc_feature 1..19: note = Description of Artificial Sequence: Synthetic oligonucleotide
  source 1..19: mol_type = other RNA
agcgctgggatcttcagca

SEQ ID NO: 1464 - RNA, 19 nt, synthetic construct
  misc_feature 1..19: note = Description of Artificial Sequence: Synthetic oligonucleotide
  source 1..19: mol_type = other RNA
gcgctgggatcttcagcac

SEQ ID NO: 1465 - RNA, 19 nt, synthetic construct
  misc_feature 1..19: note = Description of Artificial Sequence: Synthetic oligonucleotide
  source 1..19: mol_type = other RNA
cgctgggatcttcagcacc

SEQ ID NO: 1466 - RNA, 19 nt, synthetic construct
  misc_feature 1..19: note = Description of Artificial Sequence: Synthetic oligonucleotide
  source 1..19: mol_type = other RNA
gctgggatcttcagcaccc

SEQ ID NO: 1467 - RNA, 19 nt, synthetic construct
  misc_feature 1..19: note = Description of Artificial Sequence: Synthetic oligonucleotide
  source 1..19: mol_type = other RNA
ctgggatcttcagcacccg

SEQ ID NO: 1468 - RNA, 19 nt, synthetic construct
  misc_feature 1..19: note = Description of Artificial Sequence: Synthetic oligonucleotide
  source 1..19: mol_type = other RNA
tgggatcttcagcacccgc

SEQ ID NO: 1469 - RNA, 19 nt, synthetic construct
  misc_feature 1..19: note = Description of Artificial Sequence: Synthetic oligonucleotide
  source 1..19: mol_type = other RNA
gggatcttcagcacccgca

SEQ ID NO: 1470 - RNA, 19 nt, synthetic construct
  misc_feature 1..19: note = Description of Artificial Sequence: Synthetic oligonucleotide
  source 1..19: mol_type = other RNA
ggatcttcagcacccgcac

SEQ ID NO: 1471 - RNA, 19 nt, synthetic construct
  misc_feature 1..19: note = Description of Artificial Sequence: Synthetic oligonucleotide
  source 1..19: mol_type = other RNA
gatcttcagcacccgcacc

SEQ ID NO: 1472 - RNA, 19 nt, synthetic construct
  misc_feature 1..19: note = Description of Artificial Sequence: Synthetic oligonucleotide
  source 1..19: mol_type = other RNA
atcttcagcacccgcacca

SEQ ID NO: 1473 - RNA, 19 nt, synthetic construct
  misc_feature 1..19: note = Description of Artificial Sequence: Synthetic oligonucleotide
  source 1..19: mol_type = other RNA
tcttcagcacccgcaccag

SEQ ID NO: 1474 - RNA, 19 nt, synthetic construct
  misc_feature 1..19: note = Description of Artificial Sequence: Synthetic oligonucleotide
  source 1..19: mol_type = other RNA
cttcagcacccgcaccagc

SEQ ID NO: 1475 - RNA, 19 nt, synthetic construct
  misc_feature 1..19: note = Description of Artificial Sequence: Synthetic oligonucleotide
  source 1..19: mol_type = other RNA
ttcagcacccgcaccagca

SEQ ID NO: 1476 - RNA, 19 nt, synthetic construct
  misc_feature 1..19: note = Description of Artificial Sequence: Synthetic oligonucleotide
  source 1..19: mol_type = other RNA
tcagcacccgcaccagcac

SEQ ID NO: 1477 - RNA, 19 nt, synthetic construct
  misc_feature 1..19: note = Description of Artificial Sequence: Synthetic oligonucleotide
  source 1..19: mol_type = other RNA
cagcacccgcaccagcacc

SEQ ID NO: 1478 - RNA, 19 nt, synthetic construct
  misc_feature 1..19: note = Description of Artificial Sequence: Synthetic oligonucleotide
  source 1..19: mol_type = other RNA
agcacccgcaccagcaccc

SEQ ID NO: 1479 - RNA, 19 nt, synthetic construct
  misc_feature 1..19: note = Description of Artificial Sequence: Synthetic oligonucleotide
  source 1..19: mol_type = other RNA
gcacccgcaccagcacccc

SEQ ID NO: 1480 - RNA, 19 nt, synthetic construct
  misc_feature 1..19: note = Description of Artificial Sequence: Synthetic oligonucleotide
  source 1..19: mol_type = other RNA
cacccgcaccagcacccct

SEQ ID NO: 1481 - RNA, 19 nt, synthetic construct
  misc_feature 1..19: note = Description of Artificial Sequence: Synthetic oligonucleotide
  source 1..19: mol_type = other RNA
acccgcaccagcacccctt

SEQ ID NO: 1482 - RNA, 19 nt, synthetic construct
  misc_feature 1..19: note = Description of Artificial Sequence: Synthetic oligonucleotide
  source 1..19: mol_type = other RNA
cccgcaccagcaccccttc

SEQ ID NO: 1483 - RNA, 19 nt, synthetic construct
  misc_feature 1..19: note = Description of Artificial Sequence: Synthetic oligonucleotide
  source 1..19: mol_type = other RNA
ccgcaccagcaccccttcg

SEQ ID NO: 1484 - RNA, 19 nt, synthetic construct
  misc_feature 1..19: note = Description of Artificial Sequence: Synthetic oligonucleotide
  source 1..19: mol_type = other RNA
cgcaccagcaccccttcga

SEQ ID NO: 1485 - RNA, 19 nt, synthetic construct
  misc_feature 1..19: note = Description of Artificial Sequence: Synthetic oligonucleotide
  source 1..19: mol_type = other RNA
gcaccagcaccccttcgag

SEQ ID NO: 1486 - RNA, 19 nt, synthetic construct
  misc_feature 1..19: note = Description of Artificial Sequence: Synthetic oligonucleotide
  source 1..19: mol_type = other RNA
caccagcaccccttcgagc

SEQ ID NO: 1487 - RNA, 19 nt, synthetic construct
  misc_feature 1..19: note = Description of Artificial Sequence: Synthetic oligonucleotide
  source 1..19: mol_type = other RNA
accagcaccccttcgagcc

SEQ ID NO: 1488 - RNA, 19 nt, synthetic construct
  misc_feature 1..19: note = Description of Artificial Sequence: Synthetic oligonucleotide
  source 1..19: mol_type = other RNA
ccagcaccccttcgagccg

SEQ ID NO: 1489 - RNA, 19 nt, synthetic construct
  misc_feature 1..19: note = Description of Artificial Sequence: Synthetic oligonucleotide
  source 1..19: mol_type = other RNA
cagcaccccttcgagccgg

SEQ ID NO: 1490 - RNA, 19 nt, synthetic construct
  misc_feature 1..19: note = Description of Artificial Sequence: Synthetic oligonucleotide
  source 1..19: mol_type = other RNA
agcaccccttcgagccggg

SEQ ID NO: 1491 - RNA, 19 nt, synthetic construct
  misc_feature 1..19: note = Description of Artificial Sequence: Synthetic oligonucleotide
  source 1..19: mol_type = other RNA
gcaccccttcgagccgggc

SEQ ID NO: 1492 - RNA, 19 nt, synthetic construct
  misc_feature 1..19: note = Description of Artificial Sequence: Synthetic oligonucleotide
  source 1..19: mol_type = other RNA
caccccttcgagccgggca

SEQ ID NO: 1493 - RNA, 19 nt, synthetic construct
  misc_feature 1..19: note = Description of Artificial Sequence: Synthetic oligonucleotide
  source 1..19: mol_type = other RNA
accccttcgagccgggcaa

SEQ ID NO: 1494 - RNA, 19 nt, synthetic construct
  misc_feature 1..19: note = Description of Artificial Sequence: Synthetic oligonucleotide
  source 1..19: mol_type = other RNA
ccccttcgagccgggcaag

SEQ ID NO: 1495 - RNA, 19 nt, synthetic construct
  misc_feature 1..19: note = Description of Artificial Sequence: Synthetic oligonucleotide
  source 1..19: mol_type = other RNA
cccttcgagccgggcaagt

SEQ ID NO: 1496 - RNA, 19 nt, synthetic construct
  misc_feature 1..19: note = Description of Artificial Sequence: Synthetic oligonucleotide
  source 1..19: mol_type = other RNA
ccttcgagccgggcaagtt

SEQ ID NO: 1497 - RNA, 19 nt, synthetic construct
  misc_feature 1..19: note = Description of Artificial Sequence: Synthetic oligonucleotide
  source 1..19: mol_type = other RNA
cttcgagccgggcaagttc

SEQ ID NO: 1498 - RNA, 19 nt, synthetic construct
  misc_feature 1..19: note = Description of Artificial Sequence: Synthetic oligonucleotide
  source 1..19: mol_type = other RNA
ttcgagccgggcaagttcc

SEQ ID NO: 1499 - RNA, 19 nt, synthetic construct
  misc_feature 1..19: note = Description of Artificial Sequence: Synthetic oligonucleotide
  source 1..19: mol_type = other RNA
tcgagccgggcaagttcct

SEQ ID NO: 1500 - RNA, 19 nt, synthetic construct
  misc_feature 1..19: note = Description of Artificial Sequence: Synthetic oligonucleotide
  source 1..19: mol_type = other RNA
cgagccgggcaagttcctc

SEQ ID NO: 1501 - RNA, 19 nt, synthetic construct
  misc_feature 1..19: note = Description of Artificial Sequence: Synthetic oligonucleotide
  source 1..19: mol_type = other RNA
gagccgggcaagttcctcg

SEQ ID NO: 1502 - RNA, 19 nt, synthetic construct
  misc_feature 1..19: note = Description of Artificial Sequence: Synthetic oligonucleotide
  source 1..19: mol_type = other RNA
agccgggcaagttcctcga

SEQ ID NO: 1503 - RNA, 19 nt, synthetic construct
  misc_feature 1..19: note = Description of Artificial Sequence: Synthetic oligonucleotide
  source 1..19: mol_type = other RNA
gccgggcaagttcctcgac

SEQ ID NO: 1504 - RNA, 19 nt, synthetic construct
  misc_feature 1..19: note = Description of Artificial Sequence: Synthetic oligonucleotide
  source 1..19: mol_type = other RNA
ccgggcaagttcctcgacc

SEQ ID NO: 1505 - RNA, 19 nt, synthetic construct
  misc_feature 1..19: note = Description of Artificial Sequence: Synthetic oligonucleotide
  source 1..19: mol_type = other RNA
cgggcaagttcctcgacca

SEQ ID NO: 1506 - RNA, 19 nt, synthetic construct
  misc_feature 1..19: note = Description of Artificial Sequence: Synthetic oligonucleotide
  source 1..19: mol_type = other RNA
gggcaagttcctcgaccaa

SEQ ID NO: 1507 - RNA, 19 nt, synthetic construct
  misc_feature 1..19: note = Description of Artificial Sequence: Synthetic oligonucleotide
  source 1..19: mol_type = other RNA
ggcaagttcctcgaccaag

SEQ ID NO: 1508 - RNA, 19 nt, synthetic construct
  misc_feature 1..19: note = Description of Artificial Sequence: Synthetic oligonucleotide
  source 1..19: mol_type = other RNA
gcaagttcctcgaccaagg

SEQ ID NO: 1509 - RNA, 19 nt, synthetic construct
  misc_feature 1..19: note = Description of Artificial Sequence: Synthetic oligonucleotide
  source 1..19: mol_type = other RNA
caagttcctcgaccaaggt

SEQ ID NO: 1510 - RNA, 19 nt, synthetic construct
  misc_feature 1..19: note = Description of Artificial Sequence: Synthetic oligonucleotide
  source 1..19: mol_type = other RNA
aagttcctcgaccaaggtc

SEQ ID NO: 1511 - RNA, 19 nt, synthetic construct
  misc_feature 1..19: note = Description of Artificial Sequence: Synthetic oligonucleotide
  source 1..19: mol_type = other RNA
agttcctcgaccaaggtct

SEQ ID NO: 1512 - RNA, 19 nt, synthetic construct
  misc_feature 1..19: note = Description of Artificial Sequence: Synthetic oligonucleotide
  source 1..19: mol_type = other RNA
gttcctcgaccaaggtctg

SEQ ID NO: 1513 - RNA, 19 nt, synthetic construct
  misc_feature 1..19: note = Description of Artificial Sequence: Synthetic oligonucleotide
  source 1..19: mol_type = other RNA
ttcctcgaccaaggtctgg

SEQ ID NO: 1514 - RNA, 19 nt, synthetic construct
  misc_feature 1..19: note = Description of Artificial Sequence: Synthetic oligonucleotide
  source 1..19: mol_type = other RNA
tcctcgaccaaggtctgga

SEQ ID NO: 1515 - RNA, 19 nt, synthetic construct
  misc_feature 1..19: note = Description of Artificial Sequence: Synthetic oligonucleotide
  source 1..19: mol_type = other RNA
cctcgaccaaggtctggac

SEQ ID NO: 1516 - RNA, 19 nt, synthetic construct
  misc_feature 1..19: note = Description of Artificial Sequence: Synthetic oligonucleotide
  source 1..19: mol_type = other RNA
ctcgaccaaggtctggacg

SEQ ID NO: 1517 - RNA, 19 nt, synthetic construct
  misc_feature 1..19: note = Description of Artificial Sequence: Synthetic oligonucleotide
  source 1..19: mol_type = other RNA
tcgaccaaggtctggacga

SEQ ID NO: 1518 - RNA, 19 nt, synthetic construct
  misc_feature 1..19: note = Description of Artificial Sequence: Synthetic oligonucleotide
  source 1..19: mol_type = other RNA
cgaccaaggtctggacgac

SEQ ID NO: 1519 - RNA, 19 nt, synthetic construct
  misc_feature 1..19: note = Description of Artificial Sequence: Synthetic oligonucleotide
  source 1..19: mol_type = other RNA
gaccaaggtctggacgaca

SEQ ID NO: 1520 - RNA, 19 nt, synthetic construct
  misc_feature 1..19: note = Description of Artificial Sequence: Synthetic oligonucleotide
  source 1..19: mol_type = other RNA
accaaggtctggacgacaa

SEQ ID NO: 1521 - RNA, 19 nt, synthetic construct
  misc_feature 1..19: note = Description of Artificial Sequence: Synthetic oligonucleotide
  source 1..19: mol_type = other RNA
ccaaggtctggacgacaac

SEQ ID NO: 1522 - RNA, 19 nt, synthetic construct
  misc_feature 1..19: note = Description of Artificial Sequence: Synthetic oligonucleotide
  source 1..19: mol_type = other RNA
caaggtctggacgacaact

SEQ ID NO: 1523 - RNA, 19 nt, synthetic construct
  misc_feature 1..19: note = Description of Artificial Sequence: Synthetic oligonucleotide
  source 1..19: mol_type = other RNA
aaggtctggacgacaacta

SEQ ID NO: 1524 - RNA, 19 nt, synthetic construct
  misc_feature 1..19: note = Description of Artificial Sequence: Synthetic oligonucleotide
  source 1..19: mol_type = other RNA
aggtctggacgacaactat

SEQ ID NO: 1525 - RNA, 19 nt, synthetic construct
  misc_feature 1..19: note = Description of Artificial Sequence: Synthetic oligonucleotide
  source 1..19: mol_type = other RNA
ggtctggacgacaactatt

SEQ ID NO: 1526 - RNA, 19 nt, synthetic construct
  misc_feature 1..19: note = Description of Artificial Sequence: Synthetic oligonucleotide
  source 1..19: mol_type = other RNA
gtctggacgacaactattg

SEQ ID NO: 1527 - RNA, 19 nt, synthetic construct
  misc_feature 1..19: note = Description of Artificial Sequence: Synthetic oligonucleotide
  source 1..19: mol_type = other RNA
tctggacgacaactattgc

SEQ ID NO: 1528 - RNA, 19 nt, synthetic construct
  misc_feature 1..19: note = Description of Artificial Sequence: Synthetic oligonucleotide
  source 1..19: mol_type = other RNA
ctggacgacaactattgcc

SEQ ID NO: 1529 - RNA, 19 nt, synthetic construct
  misc_feature 1..19: note = Description of Artificial Sequence: Synthetic oligonucleotide
  source 1..19: mol_type = other RNA
tggacgacaactattgccg

SEQ ID NO: 1530 - RNA, 19 nt, synthetic construct
  misc_feature 1..19: note = Description of Artificial Sequence: Synthetic oligonucleotide
  source 1..19: mol_type = other RNA
ggacgacaactattgccgg

SEQ ID NO: 1531 - RNA, 19 nt, synthetic construct
  misc_feature 1..19: note = Description of Artificial Sequence: Synthetic oligonucleotide
  source 1..19: mol_type = other RNA
gacgacaactattgccgga

SEQ ID NO: 1532 - RNA, 19 nt, synthetic construct
  misc_feature 1..19: note = Description of Artificial Sequence: Synthetic oligonucleotide
  source 1..19: mol_type = other RNA
acgacaactattgccggaa

SEQ ID NO: 1533 - RNA, 19 nt, synthetic construct
  misc_feature 1..19: note = Description of Artificial Sequence: Synthetic oligonucleotide
  source 1..19: mol_type = other RNA
cgacaactattgccggaat

SEQ ID NO: 1534 - RNA, 19 nt, synthetic construct
  misc_feature 1..19: note = Description of Artificial Sequence: Synthetic oligonucleotide
  source 1..19: mol_type = other RNA
gacaactattgccggaatc

SEQ ID NO: 1535 - RNA, 19 nt, synthetic construct
  misc_feature 1..19: note = Description of Artificial Sequence: Synthetic oligonucleotide
  source 1..19: mol_type = other RNA
acaactattgccggaatcc

SEQ ID NO: 1536 - RNA, 19 nt, synthetic construct
  misc_feature 1..19: note = Description of Artificial Sequence: Synthetic oligonucleotide
  source 1..19: mol_type = other RNA
caactattgccggaatcct

SEQ ID NO: 1537 - RNA, 19 nt, synthetic construct
  misc_feature 1..19: note = Description of Artificial Sequence: Synthetic oligonucleotide
  source 1..19: mol_type = other RNA
aactattgccggaatcctg

SEQ ID NO: 1538 - RNA, 19 nt, synthetic construct
  misc_feature 1..19: note = Description of Artificial Sequence: Synthetic oligonucleotide
  source 1..19: mol_type = other RNA
actattgccggaatcctga

SEQ ID NO: 1539 - RNA, 19 nt, synthetic construct
  misc_feature 1..19: note = Description of Artificial Sequence: Synthetic oligonucleotide
  source 1..19: mol_type = other RNA
ctattgccggaatcctgac

SEQ ID NO: 1540 - RNA, 19 nt, synthetic construct
  misc_feature 1..19: note = Description of Artificial Sequence: Synthetic oligonucleotide
  source 1..19: mol_type = other RNA
tattgccggaatcctgacg

SEQ ID NO: 1541 - RNA, 19 nt, synthetic construct
  misc_feature 1..19: note = Description of Artificial Sequence: Synthetic oligonucleotide
  source 1..19: mol_type = other RNA
attgccggaatcctgacgg

SEQ ID NO: 1542 - RNA, 19 nt, synthetic construct
  misc_feature 1..19: note = Description of Artificial Sequence: Synthetic oligonucleotide
  source 1..19: mol_type = other RNA
ttgccggaatcctgacggc

SEQ ID NO: 1543 - RNA, 19 nt, synthetic construct
  misc_feature 1..19: note = Description of Artificial Sequence: Synthetic oligonucleotide
  source 1..19: mol_type = other RNA
tgccggaatcctgacggct

SEQ ID NO: 1544 - RNA, 19 nt, synthetic construct
  misc_feature 1..19: note = Description of Artificial Sequence: Synthetic oligonucleotide
  source 1..19: mol_type = other RNA
gccggaatcctgacggctc

SEQ ID NO: 1545 - RNA, 19 nt, synthetic construct
  misc_feature 1..19: note = Description of Artificial Sequence: Synthetic oligonucleotide
  source 1..19: mol_type = other RNA
ccggaatcctgacggctcc

SEQ ID NO: 1546 - RNA, 19 nt, synthetic construct
  misc_feature 1..19: note = Description of Artificial Sequence: Synthetic oligonucleotide
  source 1..19: mol_type = other RNA
cggaatcctgacggctccg

SEQ ID NO: 1547 - RNA, 19 nt, synthetic construct
  misc_feature 1..19: note = Description of Artificial Sequence: Synthetic oligonucleotide
  source 1..19: mol_type = other RNA
ggaatcctgacggctccga

SEQ ID NO: 1548 - RNA, 19 nt, synthetic construct
  misc_feature 1..19: note = Description of Artificial Sequence: Synthetic oligonucleotide
  source 1..19: mol_type = other RNA
gaatcctgacggctccgag

SEQ ID NO: 1549 - RNA, 19 nt, synthetic construct
  misc_feature 1..19: note = Description of Artificial Sequence: Synthetic oligonucleotide
  source 1..19: mol_type = other RNA
aatcctgacggctccgagc

SEQ ID NO: 1550 - RNA, 19 nt, synthetic construct
  misc_feature 1..19: note = Description of Artificial Sequence: Synthetic oligonucleotide
  source 1..19: mol_type = other RNA
atcctgacggctccgagcg

SEQ ID NO: 1551 - RNA, 19 nt, synthetic construct
  misc_feature 1..19: note = Description of Artificial Sequence: Synthetic oligonucleotide
  source 1..19: mol_type = other RNA
tcctgacggctccgagcgg

SEQ ID NO: 1552 - RNA, 19 nt, synthetic construct
  misc_feature 1..19: note = Description of Artificial Sequence: Synthetic oligonucleotide
  source 1..19: mol_type = other RNA
cctgacggctccgagcggc

SEQ ID NO: 1553 - RNA, 19 nt, synthetic construct
  misc_feature 1..19: note = Description of Artificial Sequence: Synthetic oligonucleotide
  source 1..19: mol_type = other RNA
ctgacggctccgagcggcc

SEQ ID NO: 1554 - RNA, 19 nt, synthetic construct
  misc_feature 1..19: note = Description of Artificial Sequence: Synthetic oligonucleotide
  source 1..19: mol_type = other RNA
tgacggctccgagcggcca

SEQ ID NO: 1555 - RNA, 19 nt, synthetic construct
  misc_feature 1..19: note = Description of Artificial Sequence: Synthetic oligonucleotide
  source 1..19: mol_type = other RNA
gacggctccgagcggccat

SEQ ID NO: 1556 - RNA, 19 nt, synthetic construct
  misc_feature 1..19: note = Description of Artificial Sequence: Synthetic oligonucleotide
  source 1..19: mol_type = other RNA
acggctccgagcggccatg

SEQ ID NO: 1557 - RNA, 19 nt, synthetic construct
  misc_feature 1..19: note = Description of Artificial Sequence: Synthetic oligonucleotide
  source 1..19: mol_type = other RNA
cggctccgagcggccatgg

SEQ ID NO: 1558 - RNA, 19 nt, synthetic construct
  misc_feature 1..19: note = Description of Artificial Sequence: Synthetic oligonucleotide
  source 1..19: mol_type = other RNA
ggctccgagcggccatggt

SEQ ID NO: 1559 - RNA, 19 nt, synthetic construct
  misc_feature 1..19: note = Description of Artificial Sequence: Synthetic oligonucleotide
  source 1..19: mol_type = other RNA
gctccgagcggccatggtg

SEQ ID NO: 1560 - RNA, 19 nt, synthetic construct
  misc_feature 1..19: note = Description of Artificial Sequence: Synthetic oligonucleotide
  source 1..19: mol_type = other RNA
ctccgagcggccatggtgc

SEQ ID NO: 1561 - RNA, 19 nt, synthetic construct
  misc_feature 1..19: note = Description of Artificial Sequence: Synthetic oligonucleotide
  source 1..19: mol_type = other RNA
tccgagcggccatggtgct

SEQ ID NO: 1562 - RNA, 19 nt, synthetic construct
  misc_feature 1..19: note = Description of Artificial Sequence: Synthetic oligonucleotide
  source 1..19: mol_type = other RNA
ccgagcggccatggtgcta

SEQ ID NO: 1563 - RNA, 19 nt, synthetic construct
  misc_feature 1..19: note = Description of Artificial Sequence: Synthetic oligonucleotide
  source 1..19: mol_type = other RNA
cgagcggccatggtgctac

SEQ ID NO: 1564 - RNA, 19 nt, synthetic construct
  misc_feature 1..19: note = Description of Artificial Sequence: Synthetic oligonucleotide
  source 1..19: mol_type = other RNA
gagcggccatggtgctaca

SEQ ID NO: 1565 - RNA, 19 nt, synthetic construct
  misc_feature 1..19: note = Description of Artificial Sequence: Synthetic oligonucleotide
  source 1..19: mol_type = other RNA
agcggccatggtgctacac

SEQ ID NO: 1566 - RNA, 19 nt, synthetic construct
  misc_feature 1..19: note = Description of Artificial Sequence: Synthetic oligonucleotide
  source 1..19: mol_type = other RNA
gcggccatggtgctacact

SEQ ID NO: 1567 - RNA, 19 nt, synthetic construct
  misc_feature 1..19: note = Description of Artificial Sequence: Synthetic oligonucleotide
  source 1..19: mol_type = other RNA
cggccatggtgctacacta

SEQ ID NO: 1568 - RNA, 19 nt, synthetic construct
  misc_feature 1..19: note = Description of Artificial Sequence: Synthetic oligonucleotide
  source 1..19: mol_type = other RNA
ggccatggtgctacactac

SEQ ID NO: 1569 - RNA, 19 nt, synthetic construct
  misc_feature 1..19: note = Description of Artificial Sequence: Synthetic oligonucleotide
  source 1..19: mol_type = other RNA
gccatggtgctacactacg

SEQ ID NO: 1570 - RNA, 19 nt, synthetic construct
  misc_feature 1..19: note = Description of Artificial Sequence: Synthetic oligonucleotide
  source 1..19: mol_type = other RNA
ccatggtgctacactacgg

SEQ ID NO: 1571 - RNA, 19 nt, synthetic construct
  misc_feature 1..19: note = Description of Artificial Sequence: Synthetic oligonucleotide
  source 1..19: mol_type = other RNA
catggtgctacactacgga

SEQ ID NO: 1572 - RNA, 19 nt, synthetic construct
  misc_feature 1..19: note = Description of Artificial Sequence: Synthetic oligonucleotide
  source 1..19: mol_type = other RNA
atggtgctacactacggat

SEQ ID NO: 1573 - RNA, 19 nt, synthetic construct
  misc_feature 1..19: note = Description of Artificial Sequence: Synthetic oligonucleotide
  source 1..19: mol_type = other RNA
tggtgctacactacggatc

SEQ ID NO: 1574 - RNA, 19 nt, synthetic construct
  misc_feature 1..19: note = Description of Artificial Sequence: Synthetic oligonucleotide
  source 1..19: mol_type = other RNA
ggtgctacactacggatcc

SEQ ID NO: 1575 - RNA, 19 nt, synthetic construct
  misc_feature 1..19: note = Description of Artificial Sequence: Synthetic oligonucleotide
  source 1..19: mol_type = other RNA
gtgctacactacggatccg

SEQ ID NO: 1576 - RNA, 19 nt, synthetic construct
  misc_feature 1..19: note = Description of Artificial Sequence: Synthetic oligonucleotide
  source 1..19: mol_type = other RNA
tgctacactacggatccgc

SEQ ID NO: 1577 - RNA, 19 nt, synthetic construct
  misc_feature 1..19: note = Description of Artificial Sequence: Synthetic oligonucleotide
  source 1..19: mol_type = other RNA
gctacactacggatccgca

SEQ ID NO: 1578 - RNA, 19 nt, synthetic construct
  misc_feature 1..19: note = Description of Artificial Sequence: Synthetic oligonucleotide
  source 1..19: mol_type = other RNA
ctacactacggatccgcag

SEQ ID NO: 1579 - RNA, 19 nt, synthetic construct
  misc_feature 1..19: note = Description of Artificial Sequence: Synthetic oligonucleotide
  source 1..19: mol_type = other RNA
tacactacggatccgcaga

SEQ ID NO: 1580 - RNA, 19 nt, synthetic construct
  misc_feature 1..19: note = Description of Artificial Sequence: Synthetic oligonucleotide
  source 1..19: mol_type = other RNA
acactacggatccgcagat

SEQ ID NO: 1581 - RNA, 19 nt, synthetic construct
  misc_feature 1..19: note = Description of Artificial Sequence: Synthetic oligonucleotide
  source 1..19: mol_type = other RNA
cactacggatccgcagatc

SEQ ID NO: 1582 - RNA, 19 nt, synthetic construct
  misc_feature 1..19: note = Description of Artificial Sequence: Synthetic oligonucleotide
  source 1..19: mol_type = other RNA
actacggatccgcagatcg

SEQ ID NO: 1583 - RNA, 19 nt, synthetic construct
  misc_feature 1..19: note = Description of Artificial Sequence: Synthetic oligonucleotide
  source 1..19: mol_type = other RNA
ctacggatccgcagatcga

SEQ ID NO: 1584 - RNA, 19 nt, synthetic construct
  misc_feature 1..19: note = Description of Artificial Sequence: Synthetic oligonucleotide
  source 1..19: mol_type = other RNA
tacggatccgcagatcgag

SEQ ID NO: 1585 - RNA, 19 nt, synthetic construct
  misc_feature 1..19: note = Description of Artificial Sequence: Synthetic oligonucleotide
  source 1..19: mol_type = other RNA
acggatccgcagatcgagc

SEQ ID NO: 1586 - RNA, 19 nt, synthetic construct
  misc_feature 1..19: note = Description of Artificial Sequence: Synthetic oligonucleotide
  source 1..19: mol_type = other RNA
cggatccgcagatcgagcg

SEQ ID NO: 1587 - RNA, 19 nt, synthetic construct
  misc_feature 1..19: note = Description of Artificial Sequence: Synthetic oligonucleotide
  source 1..19: mol_type = other RNA
ggatccgcagatcgagcga

SEQ ID NO: 1588 - RNA, 19 nt, synthetic construct
  misc_feature 1..19: note = Description of Artificial Sequence: Synthetic oligonucleotide
  source 1..19: mol_type = other RNA
gatccgcagatcgagcgag

SEQ ID NO: 1589 - RNA, 19 nt, synthetic construct
  misc_feature 1..19: note = Description of Artificial Sequence: Synthetic oligonucleotide
  source 1..19: mol_type = other RNA
atccgcagatcgagcgaga

SEQ ID NO: 1590 - RNA, 19 nt, synthetic construct
  misc_feature 1..19: note = Description of Artificial Sequence: Synthetic oligonucleotide
  source 1..19: mol_type = other RNA
tccgcagatcgagcgagag

SEQ ID NO: 1591 - RNA, 19 nt, synthetic construct
  misc_feature 1..19: note = Description of Artificial Sequence: Synthetic oligonucleotide
  source 1..19: mol_type = other RNA
ccgcagatcgagcgagagt

SEQ ID NO: 1592 - RNA, 19 nt, synthetic construct
  misc_feature 1..19: note = Description of Artificial Sequence: Synthetic oligonucleotide
  source 1..19: mol_type = other RNA
cgcagatcgagcgagagtt

SEQ ID NO: 1593 - RNA, 19 nt, synthetic construct
  misc_feature 1..19: note = Description of Artificial Sequence: Synthetic oligonucleotide
  source 1..19: mol_type = other RNA
gcagatcgagcgagagttc

SEQ ID NO: 1594 - RNA, 19 nt, synthetic construct
  misc_feature 1..19: note = Description of Artificial Sequence: Synthetic oligonucleotide
  source 1..19: mol_type = other RNA
cagatcgagcgagagttct

SEQ ID NO: 1595 - RNA, 19 nt, synthetic construct
  misc_feature 1..19: note = Description of Artificial Sequence: Synthetic oligonucleotide
  source 1..19: mol_type = other RNA
agatcgagcgagagttctg

SEQ ID NO: 1596 - RNA, 19 nt, synthetic construct
  misc_feature 1..19: note = Description of Artificial Sequence: Synthetic oligonucleotide
  source 1..19: mol_type = other RNA
gatcgagcgagagttctgt

SEQ ID NO: 1597 - RNA, 19 nt, synthetic construct
  misc_feature 1..19: note = Description of Artificial Sequence: Synthetic oligonucleotide
  source 1..19: mol_type = other RNA
atcgagcgagagttctgtg

SEQ ID NO: 1598 - RNA, 19 nt, synthetic construct
  misc_feature 1..19: note = Description of Artificial Sequence: Synthetic oligonucleotide
  source 1..19: mol_type = other RNA
tcgagcgagagttctgtga

SEQ ID NO: 1599 - RNA, 19 nt, synthetic construct
  misc_feature 1..19: note = Description of Artificial Sequence: Synthetic oligonucleotide
  source 1..19: mol_type = other RNA
cgagcgagagttctgtgac

SEQ ID NO: 1600 - RNA, 19 nt, synthetic construct
  misc_feature 1..19: note = Description of Artificial Sequence: Synthetic oligonucleotide
  source 1..19: mol_type = other RNA
gagcgagagttctgtgacc

SEQ ID NO: 1601 - RNA, 19 nt, synthetic construct
  misc_feature 1..19: note = Description of Artificial Sequence: Synthetic oligonucleotide
  source 1..19: mol_type = other RNA
agcgagagttctgtgacct

SEQ ID NO: 1602 - RNA, 19 nt, synthetic construct
  misc_feature 1..19: note = Description of Artificial Sequence: Synthetic oligonucleotide
  source 1..19: mol_type = other RNA
gcgagagttctgtgacctc

SEQ ID NO: 1603 - RNA, 19 nt, synthetic construct
  misc_feature 1..19: note = Description of Artificial Sequence: Synthetic oligonucleotide
  source 1..19: mol_type = other RNA
cgagagttctgtgacctcc

SEQ ID NO: 1604 - RNA, 19 nt, synthetic construct
  misc_feature 1..19: note = Description of Artificial Sequence: Synthetic oligonucleotide
  source 1..19: mol_type = other RNA
gagagttctgtgacctccc

SEQ ID NO: 1605 - RNA, 19 nt, synthetic construct
  misc_feature 1..19: note = Description of Artificial Sequence: Synthetic oligonucleotide
  source 1..19: mol_type = other RNA
agagttctgtgacctcccc

SEQ ID NO: 1606 - RNA, 19 nt, synthetic construct
  misc_feature 1..19: note = Description of Artificial Sequence: Synthetic oligonucleotide
  source 1..19: mol_type = other RNA
gagttctgtgacctccccc

SEQ ID NO: 1607 - RNA, 19 nt, synthetic construct
  misc_feature 1..19: note = Description of Artificial Sequence: Synthetic oligonucleotide
  source 1..19: mol_type = other RNA
agttctgtgacctcccccg

SEQ ID NO: 1608 - RNA, 19 nt, synthetic construct
  misc_feature 1..19: note = Description of Artificial Sequence: Synthetic oligonucleotide
  source 1..19: mol_type = other RNA
gttctgtgacctcccccgc

SEQ ID NO: 1609 - RNA, 19 nt, synthetic construct
  misc_feature 1..19: note = Description of Artificial Sequence: Synthetic oligonucleotide
  source 1..19: mol_type = other RNA
ttctgtgacctcccccgct

SEQ ID NO: 1610 - RNA, 19 nt, synthetic construct
  misc_feature 1..19: note = Description of Artificial Sequence: Synthetic oligonucleotide
  source 1..19: mol_type = other RNA
tctgtgacctcccccgctg

SEQ ID NO: 1611 - RNA, 19 nt, synthetic construct
  misc_feature 1..19: note = Description of Artificial Sequence: Synthetic oligonucleotide
  source 1..19: mol_type = other RNA
ctgtgacctcccccgctgc

SEQ ID NO: 1612 - RNA, 19 nt, synthetic construct
  misc_feature 1..19: note = Description of Artificial Sequence: Synthetic oligonucleotide
  source 1..19: mol_type = other RNA
tgtgacctcccccgctgcg

SEQ ID NO: 1613 - RNA, 19 nt, synthetic construct
  misc_feature 1..19: note = Description of Artificial Sequence: Synthetic oligonucleotide
  source 1..19: mol_type = other RNA
gtgacctcccccgctgcgg

SEQ ID NO: 1614 - RNA, 19 nt, synthetic construct
  misc_feature 1..19: note = Description of Artificial Sequence: Synthetic oligonucleotide
  source 1..19: mol_type = other RNA
tgacctcccccgctgcggg

SEQ ID NO: 1615 - RNA, 19 nt, synthetic construct
  misc_feature 1..19: note = Description of Artificial Sequence: Synthetic oligonucleotide
  source 1..19: mol_type = other RNA
gacctcccccgctgcgggt

SEQ ID NO: 1616 - RNA, 19 nt, synthetic construct
  misc_feature 1..19: note = Description of Artificial Sequence: Synthetic oligonucleotide
  source 1..19: mol_type = other RNA
acctcccccgctgcgggtc

SEQ ID NO: 1617 - RNA, 19 nt, synthetic construct
  misc_feature 1..19: note = Description of Artificial Sequence: Synthetic oligonucleotide
  source 1..19: mol_type = other RNA
cctcccccgctgcgggtcc

SEQ ID NO: 1618 - RNA, 19 nt, synthetic construct
  misc_feature 1..19: note = Description of Artificial Sequence: Synthetic oligonucleotide
  source 1..19: mol_type = other RNA
ctcccccgctgcgggtccg

SEQ ID NO: 1619 - RNA, 19 nt, synthetic construct
  misc_feature 1..19: note = Description of Artificial Sequence: Synthetic oligonucleotide
  source 1..19: mol_type = other RNA
tcccccgctgcgggtccga

SEQ ID NO: 1620 - RNA, 19 nt, synthetic construct
  misc_feature 1..19: note = Description of Artificial Sequence: Synthetic oligonucleotide
  source 1..19: mol_type = other RNA
cccccgctgcgggtccgag

SEQ ID NO: 1621 - RNA, 19 nt, synthetic construct
  misc_feature 1..19: note = Description of Artificial Sequence: Synthetic oligonucleotide
  source 1..19: mol_type = other RNA
ccccgctgcgggtccgagg

SEQ ID NO: 1622 - RNA, 19 nt, synthetic construct
  misc_feature 1..19: note = Description of Artificial Sequence: Synthetic oligonucleotide
  source 1..19: mol_type = other RNA
cccgctgcgggtccgaggc

SEQ ID NO: 1623 - RNA, 19 nt, synthetic construct
  misc_feature 1..19: note = Description of Artificial Sequence: Synthetic oligonucleotide
  source 1..19: mol_type = other RNA
ccgctgcgggtccgaggca

SEQ ID NO: 1624 - RNA, 19 nt, synthetic construct
  misc_feature 1..19: note = Description of Artificial Sequence: Synthetic oligonucleotide
  source 1..19: mol_type = other RNA
cgctgcgggtccgaggcac

SEQ ID NO: 1625 - RNA, 19 nt, synthetic construct
  misc_feature 1..19: note = Description of Artificial Sequence: Synthetic oligonucleotide
  source 1..19: mol_type = other RNA
gctgcgggtccgaggcaca

SEQ ID NO: 1626 - RNA, 19 nt, synthetic construct
  misc_feature 1..19: note = Description of Artificial Sequence: Synthetic oligonucleotide
  source 1..19: mol_type = other RNA
ctgcgggtccgaggcacag

SEQ ID NO: 1627 - RNA, 19 nt, synthetic construct
  misc_feature 1..19: note = Description of Artificial Sequence: Synthetic oligonucleotide
  source 1..19: mol_type = other RNA
tgcgggtccgaggcacagc

SEQ ID NO: 1628 - RNA, 19 nt, synthetic construct
  misc_feature 1..19: note = Description of Artificial Sequence: Synthetic oligonucleotide
  source 1..19: mol_type = other RNA
gcgggtccgaggcacagcc

SEQ ID NO: 1629 - RNA, 19 nt, synthetic construct
  misc_feature 1..19: note = Description of Artificial Sequence: Synthetic oligonucleotide
  source 1..19: mol_type = other RNA
cgggtccgaggcacagccc

SEQ ID NO: 1630 - RNA, 19 nt, synthetic construct
  misc_feature 1..19: note = Description of Artificial Sequence: Synthetic oligonucleotide
  source 1..19: mol_type = other RNA
gggtccgaggcacagcccc

SEQ ID NO: 1631 - RNA, 19 nt, synthetic construct
  misc_feature 1..19: note = Description of Artificial Sequence: Synthetic oligonucleotide
  source 1..19: mol_type = other RNA
ggtccgaggcacagccccg

SEQ ID NO: 1632 - RNA, 19 nt, synthetic construct
  misc_feature 1..19: note = Description of Artificial Sequence: Synthetic oligonucleotide
  source 1..19: mol_type = other RNA
gtccgaggcacagccccgc

SEQ ID NO: 1633 - RNA, 19 nt, synthetic construct
  misc_feature 1..19: note = Description of Artificial Sequence: Synthetic oligonucleotide
  source 1..19: mol_type = other RNA
tccgaggcacagccccgcc

SEQ ID NO: 1634 - RNA, 19 nt, synthetic construct
  misc_feature 1..19: note = Description of Artificial Sequence: Synthetic oligonucleotide
  source 1..19: mol_type = other RNA
ccgaggcacagccccgcca

SEQ ID NO: 1635 - RNA, 19 nt, synthetic construct
  misc_feature 1..19: note = Description of Artificial Sequence: Synthetic oligonucleotide
  source 1..19: mol_type = other RNA
cgaggcacagccccgccaa

SEQ ID NO: 1636 - RNA, 19 nt, synthetic construct
  misc_feature 1..19: note = Description of Artificial Sequence: Synthetic oligonucleotide
  source 1..19: mol_type = other RNA
gaggcacagccccgccaag

SEQ ID NO: 1637 - RNA, 19 nt, synthetic construct
  misc_feature 1..19: note = Description of Artificial Sequence: Synthetic oligonucleotide
  source 1..19: mol_type = other RNA
aggcacagccccgccaaga

SEQ ID NO: 1638 - RNA, 19 nt, synthetic construct
  misc_feature 1..19: note = Description of Artificial Sequence: Synthetic oligonucleotide
  source 1..19: mol_type = other RNA
ggcacagccccgccaagag

SEQ ID NO: 1639 - RNA, 19 nt, synthetic construct
  misc_feature 1..19: note = Description of Artificial Sequence: Synthetic oligonucleotide
  source 1..19: mol_type = other RNA
gcacagccccgccaagagg

SEQ ID NO: 1640 - RNA, 19 nt, synthetic construct
  misc_feature 1..19: note = Description of Artificial Sequence: Synthetic oligonucleotide
  source 1..19: mol_type = other RNA
cacagccccgccaagaggc

SEQ ID NO: 1641 - RNA, 19 nt, synthetic construct
  misc_feature 1..19: note = Description of Artificial Sequence: Synthetic oligonucleotide
  source 1..19: mol_type = other RNA
acagccccgccaagaggcc

SEQ ID NO: 1642 - RNA, 19 nt, synthetic construct
  misc_feature 1..19: note = Description of Artificial Sequence: Synthetic oligonucleotide
  source 1..19: mol_type = other RNA
cagccccgccaagaggcca

SEQ ID NO: 1643 - RNA, 19 nt, synthetic construct
  misc_feature 1..19: note = Description of Artificial Sequence: Synthetic oligonucleotide
  source 1..19: mol_type = other RNA
agccccgccaagaggccac

SEQ ID NO: 1644 - RNA, 19 nt, synthetic construct
  misc_feature 1..19: note = Description of Artificial Sequence: Synthetic oligonucleotide
  source 1..19: mol_type = other RNA
gccccgccaagaggccaca

SEQ ID NO: 1645 - RNA, 19 nt, synthetic construct
  misc_feature 1..19: note = Description of Artificial Sequence: Synthetic oligonucleotide
  source 1..19: mol_type = other RNA
ccccgccaagaggccacaa

SEQ ID NO: 1646 - RNA, 19 nt, synthetic construct
  misc_feature 1..19: note = Description of Artificial Sequence: Synthetic oligonucleotide
  source 1..19: mol_type = other RNA
cccgccaagaggccacaac

SEQ ID NO: 1647 - RNA, 19 nt, synthetic construct
  misc_feature 1..19: note = Description of Artificial Sequence: Synthetic oligonucleotide
  source 1..19: mol_type = other RNA
ccgccaagaggccacaact

SEQ ID NO: 1648 - RNA, 19 nt, synthetic construct
  misc_feature 1..19: note = Description of Artificial Sequence: Synthetic oligonucleotide
  source 1..19: mol_type = other RNA
cgccaagaggccacaactg

SEQ ID NO: 1649 - RNA, 19 nt, synthetic construct
  misc_feature 1..19: note = Description of Artificial Sequence: Synthetic oligonucleotide
  source 1..19: mol_type = other RNA
gccaagaggccacaactgt

SEQ ID NO: 1650 - RNA, 19 nt, synthetic construct
  misc_feature 1..19: note = Description of Artificial Sequence: Synthetic oligonucleotide
  source 1..19: mol_type = other RNA
ccaagaggccacaactgtc

SEQ ID NO: 1651 - RNA, 19 nt, synthetic construct
  misc_feature 1..19: note = Description of Artificial Sequence: Synthetic oligonucleotide
  source 1..19: mol_type = other RNA
caagaggccacaactgtca

SEQ ID NO: 1652 - RNA, 19 nt, synthetic construct
  misc_feature 1..19: note = Description of Artificial Sequence: Synthetic oligonucleotide
  source 1..19: mol_type = other RNA
aagaggccacaactgtcag

SEQ ID NO: 1653 - RNA, 19 nt, synthetic construct
  misc_feature 1..19: note = Description of Artificial Sequence: Synthetic oligonucleotide
  source 1..19: mol_type = other RNA
agaggccacaactgtcagc

SEQ ID NO: 1654 - RNA, 19 nt, synthetic construct
  misc_feature 1..19: note = Description of Artificial Sequence: Synthetic oligonucleotide
  source 1..19: mol_type = other RNA
gaggccacaactgtcagct

SEQ ID NO: 1655 - RNA, 19 nt, synthetic construct
  misc_feature 1..19: note = Description of Artificial Sequence: Synthetic oligonucleotide
  source 1..19: mol_type = other RNA
aggccacaactgtcagctg

SEQ ID NO: 1656 - RNA, 19 nt, synthetic construct
  misc_feature 1..19: note = Description of Artificial Sequence: Synthetic oligonucleotide
  source 1..19: mol_type = other RNA
ggccacaactgtcagctgc

SEQ ID NO: 1657 - RNA, 19 nt, synthetic construct
  misc_feature 1..19: note = Description of Artificial Sequence: Synthetic oligonucleotide
  source 1..19: mol_type = other RNA
gccacaactgtcagctgct

SEQ ID NO: 1658 - RNA, 19 nt, synthetic construct
  misc_feature 1..19: note = Description of Artificial Sequence: Synthetic oligonucleotide
  source 1..19: mol_type = other RNA
ccacaactgtcagctgctt

SEQ ID NO: 1659 - RNA, 19 nt, synthetic construct
  misc_feature 1..19: note = Description of Artificial Sequence: Synthetic oligonucleotide
  source 1..19: mol_type = other RNA
cacaactgtcagctgcttc

SEQ ID NO: 1660 - RNA, 19 nt, synthetic construct
  misc_feature 1..19: note = Description of Artificial Sequence: Synthetic oligonucleotide
  source 1..19: mol_type = other RNA
acaactgtcagctgcttcc

SEQ ID NO: 1661 - RNA, 19 nt, synthetic construct
  misc_feature 1..19: note = Description of Artificial Sequence: Synthetic oligonucleotide
  source 1..19: mol_type = other RNA
caactgtcagctgcttccg

SEQ ID NO: 1662 - RNA, 19 nt, synthetic construct
  misc_feature 1..19: note = Description of Artificial Sequence: Synthetic oligonucleotide
  source 1..19: mol_type = other RNA
aactgtcagctgcttccgc

SEQ ID NO: 1663 - RNA, 19 nt, synthetic construct
  misc_feature 1..19: note = Description of Artificial Sequence: Synthetic oligonucleotide
  source 1..19: mol_type = other RNA
actgtcagctgcttccgcg

SEQ ID NO: 1664 - RNA, 19 nt, synthetic construct
  misc_feature 1..19: note = Description of Artificial Sequence: Synthetic oligonucleotide
  source 1..19: mol_type = other RNA
ctgtcagctgcttccgcgg

SEQ ID NO: 1665 - RNA, 19 nt, synthetic construct
  misc_feature 1..19: note = Description of Artificial Sequence: Synthetic oligonucleotide
  source 1..19: mol_type = other RNA
tgtcagctgcttccgcggg

SEQ ID NO: 1666 - RNA, 19 nt, synthetic construct
  misc_feature 1..19: note = Description of Artificial Sequence: Synthetic oligonucleotide
  source 1..19: mol_type = other RNA
gtcagctgcttccgcggga

SEQ ID NO: 1667 - RNA, 19 nt, synthetic construct
  misc_feature 1..19: note = Description of Artificial Sequence: Synthetic oligonucleotide
  source 1..19: mol_type = other RNA
tcagctgcttccgcgggaa

SEQ ID NO: 1668 - RNA, 19 nt, synthetic construct
  misc_feature 1..19: note = Description of Artificial Sequence: Synthetic oligonucleotide
  source 1..19: mol_type = other RNA
cagctgcttccgcgggaag

SEQ ID NO: 1669 - RNA, 19 nt, synthetic construct
  misc_feature 1..19: note = Description of Artificial Sequence: Synthetic oligonucleotide
  source 1..19: mol_type = other RNA
agctgcttccgcgggaagg

SEQ ID NO: 1670 - RNA, 19 nt, synthetic construct
  misc_feature 1..19: note = Description of Artificial Sequence: Synthetic oligonucleotide
  source 1..19: mol_type = other RNA
gctgcttccgcgggaaggg

SEQ ID NO: 1671 - RNA, 19 nt, synthetic construct
  misc_feature 1..19: note = Description of Artificial Sequence: Synthetic oligonucleotide
  source 1..19: mol_type = other RNA
ctgcttccgcgggaagggt

SEQ ID NO: 1672 - RNA, 19 nt, synthetic construct
  misc_feature 1..19: note = Description of Artificial Sequence: Synthetic oligonucleotide
  source 1..19: mol_type = other RNA
tgcttccgcgggaagggtg

SEQ ID NO: 1673 - RNA, 19 nt, synthetic construct
  misc_feature 1..19: note = Description of Artificial Sequence: Synthetic oligonucleotide
  source 1..19: mol_type = other RNA
gcttccgcgggaagggtga

SEQ ID NO: 1674 - RNA, 19 nt, synthetic construct
  misc_feature 1..19: note = Description of Artificial Sequence: Synthetic oligonucleotide
  source 1..19: mol_type = other RNA
cttccgcgggaagggtgag

SEQ ID NO: 1675 - RNA, 19 nt, synthetic construct
  misc_feature 1..19: note = Description of Artificial Sequence: Synthetic oligonucleotide
  source 1..19: mol_type = other RNA
ttccgcgggaagggtgagg

SEQ ID NO: 1676 - RNA, 19 nt, synthetic construct
  misc_feature 1..19: note = Description of Artificial Sequence: Synthetic oligonucleotide
  source 1..19: mol_type = other RNA
tccgcgggaagggtgaggg

SEQ ID NO: 1677 - RNA, 19 nt, synthetic construct
  misc_feature 1..19: note = Description of Artificial Sequence: Synthetic oligonucleotide
  source 1..19: mol_type = other RNA
ccgcgggaagggtgagggc

SEQ ID NO: 1678 - RNA, 19 nt, synthetic construct
  misc_feature 1..19: note = Description of Artificial Sequence: Synthetic oligonucleotide
  source 1..19: mol_type = other RNA
cgcgggaagggtgagggct

SEQ ID NO: 1679 - RNA, 19 nt, synthetic construct
  misc_feature 1..19: note = Description of Artificial Sequence: Synthetic oligonucleotide
  source 1..19: mol_type = other RNA
gcgggaagggtgagggcta

SEQ ID NO: 1680 - RNA, 19 nt, synthetic construct
  misc_feature 1..19: note = Description of Artificial Sequence: Synthetic oligonucleotide
  source 1..19: mol_type = other RNA
cgggaagggtgagggctac

SEQ ID NO: 1681 - RNA, 19 nt, synthetic construct
  misc_feature 1..19: note = Description of Artificial Sequence: Synthetic oligonucleotide
  source 1..19: mol_type = other RNA
gggaagggtgagggctacc

SEQ ID NO: 1682 - RNA, 19 nt, synthetic construct
  misc_feature 1..19: note = Description of Artificial Sequence: Synthetic oligonucleotide
  source 1..19: mol_type = other RNA
ggaagggtgagggctaccg

SEQ ID NO: 1683 - RNA, 19 nt, synthetic construct
  misc_feature 1..19: note = Description of Artificial Sequence: Synthetic oligonucleotide
  source 1..19: mol_type = other RNA
gaagggtgagggctaccgg

SEQ ID NO: 1684 - RNA, 19 nt, synthetic construct
  misc_feature 1..19: note = Description of Artificial Sequence: Synthetic oligonucleotide
  source 1..19: mol_type = other RNA
aagggtgagggctaccggg

SEQ ID NO: 1685 - RNA, 19 nt, synthetic construct
  misc_feature 1..19: note = Description of Artificial Sequence: Synthetic oligonucleotide
  source 1..19: mol_type = other RNA
agggtgagggctaccgggg

SEQ ID NO: 1686 - RNA, 19 nt, synthetic construct
  misc_feature 1..19: note = Description of Artificial Sequence: Synthetic oligonucleotide
  source 1..19: mol_type = other RNA
gggtgagggctaccggggc

SEQ ID NO: 1687 - RNA, 19 nt, synthetic construct
  misc_feature 1..19: note = Description of Artificial Sequence: Synthetic oligonucleotide
  source 1..19: mol_type = other RNA
ggtgagggctaccggggca

SEQ ID NO: 1688 - RNA, 19 nt, synthetic construct
  misc_feature 1..19: note = Description of Artificial Sequence: Synthetic oligonucleotide
  source 1..19: mol_type = other RNA
gtgagggctaccggggcac

SEQ ID NO: 1689 - RNA, 19 nt, synthetic construct
  misc_feature 1..19: note = Description of Artificial Sequence: Synthetic oligonucleotide
  source 1..19: mol_type = other RNA
tgagggctaccggggcaca

SEQ ID NO: 1690 - RNA, 19 nt, synthetic construct
  misc_feature 1..19: note = Description of Artificial Sequence: Synthetic oligonucleotide
  source 1..19: mol_type = other RNA
gagggctaccggggcacag

SEQ ID NO: 1691 - RNA, 19 nt, synthetic construct
  misc_feature 1..19: note = Description of Artificial Sequence: Synthetic oligonucleotide
  source 1..19: mol_type = other RNA
agggctaccggggcacagc

SEQ ID NO: 1692 - RNA, 19 nt, synthetic construct
  misc_feature 1..19: note = Description of Artificial Sequence: Synthetic oligonucleotide
  source 1..19: mol_type = other RNA
gggctaccggggcacagcc

SEQ ID NO: 1693 - RNA, 19 nt, synthetic construct
  misc_feature 1..19: note = Description of Artificial Sequence: Synthetic oligonucleotide
  source 1..19: mol_type = other RNA
ggctaccggggcacagcca

SEQ ID NO: 1694 - RNA, 19 nt, synthetic construct
  misc_feature 1..19: note = Description of Artificial Sequence: Synthetic oligonucleotide
  source 1..19: mol_type = other RNA
gctaccggggcacagccaa

SEQ ID NO: 1695 - RNA, 19 nt, synthetic construct
  misc_feature 1..19: note = Description of Artificial Sequence: Synthetic oligonucleotide
  source 1..19: mol_type = other RNA
ctaccggggcacagccaat

SEQ ID NO: 1696 - RNA, 19 nt, synthetic construct
  misc_feature 1..19: note = Description of Artificial Sequence: Synthetic oligonucleotide
  source 1..19: mol_type = other RNA
taccggggcacagccaata

SEQ ID NO: 1697 - RNA, 19 nt, synthetic construct
  misc_feature 1..19: note = Description of Artificial Sequence: Synthetic oligonucleotide
  source 1..19: mol_type = other RNA
accggggcacagccaatac

SEQ ID NO: 1698 - RNA, 19 nt, synthetic construct
  misc_feature 1..19: note = Description of Artificial Sequence: Synthetic oligonucleotide
  source 1..19: mol_type = other RNA
ccggggcacagccaatacc

SEQ ID NO: 1699 - RNA, 19 nt, synthetic construct
  misc_feature 1..19: note = Description of Artificial Sequence: Synthetic oligonucleotide
  source 1..19: mol_type = other RNA
cggggcacagccaatacca

SEQ ID NO: 1700 - RNA, 19 nt, synthetic construct
  misc_feature 1..19: note = Description of Artificial Sequence: Synthetic oligonucleotide
  source 1..19: mol_type = other RNA
ggggcacagccaataccac

SEQ ID NO: 1701 - RNA, 19 nt, synthetic construct
  misc_feature 1..19: note = Description of Artificial Sequence: Synthetic oligonucleotide
  source 1..19: mol_type = other RNA
gggcacagccaataccacc

SEQ ID NO: 1702 - RNA, 19 nt, synthetic construct
  misc_feature 1..19: note = Description of Artificial Sequence: Synthetic oligonucleotide
  source 1..19: mol_type = other RNA
ggcacagccaataccacca

SEQ ID NO: 1703 - RNA, 19 nt, synthetic construct
  misc_feature 1..19: note = Description of Artificial Sequence: Synthetic oligonucleotide
  source 1..19: mol_type = other RNA
gcacagccaataccaccac

SEQ ID NO: 1704 - RNA, 19 nt, synthetic construct
  misc_feature 1..19: note = Description of Artificial Sequence: Synthetic oligonucleotide
  source 1..19: mol_type = other RNA
cacagccaataccaccact

SEQ ID NO: 1705 - RNA, 19 nt, synthetic construct
  misc_feature 1..19: note = Description of Artificial Sequence: Synthetic oligonucleotide
  source 1..19: mol_type = other RNA
acagccaataccaccactg

SEQ ID NO: 1706 - RNA, 19 nt, synthetic construct
  misc_feature 1..19: note = Description of Artificial Sequence: Synthetic oligonucleotide
  source 1..19: mol_type = other RNA
cagccaataccaccactgc

SEQ ID NO: 1707 - RNA, 19 nt, synthetic construct
  misc_feature 1..19: note = Description of Artificial Sequence: Synthetic oligonucleotide
  source 1..19: mol_type = other RNA
agccaataccaccactgcg

SEQ ID NO: 1708 - RNA, 19 nt, synthetic construct
  misc_feature 1..19: note = Description of Artificial Sequence: Synthetic oligonucleotide
  source 1..19: mol_type = other RNA
gccaataccaccactgcgg

SEQ ID NO: 1709 - RNA, 19 nt, synthetic construct
  misc_feature 1..19: note = Description of Artificial Sequence: Synthetic oligonucleotide
  source 1..19: mol_type = other RNA
ccaataccaccactgcggg

SEQ ID NO: 1710 - RNA, 19 nt, synthetic construct
  misc_feature 1..19: note = Description of Artificial Sequence: Synthetic oligonucleotide
  source 1..19: mol_type = other RNA
caataccaccactgcgggc

SEQ ID NO: 1711 - RNA, 19 nt, synthetic construct
  misc_feature 1..19: note = Description of Artificial Sequence: Synthetic oligonucleotide
  source 1..19: mol_type = other RNA
aataccaccactgcgggcg

SEQ ID NO: 1712 - RNA, 19 nt, synthetic construct
  misc_feature 1..19: note = Description of Artificial Sequence: Synthetic oligonucleotide
  source 1..19: mol_type = other RNA
ataccaccactgcgggcgt

SEQ ID NO: 1713 - RNA, 19 nt, synthetic construct
  misc_feature 1..19: note = Description of Artificial Sequence: Synthetic oligonucleotide
  source 1..19: mol_type = other RNA
taccaccactgcgggcgta

SEQ ID NO: 1714 - RNA, 19 nt, synthetic construct
  misc_feature 1..19: note = Description of Artificial Sequence: Synthetic oligonucleotide
  source 1..19: mol_type = other RNA
accaccactgcgggcgtac

SEQ ID NO: 1715 - RNA, 19 nt, synthetic construct
  misc_feature 1..19: note = Description of Artificial Sequence: Synthetic oligonucleotide
  source 1..19: mol_type = other RNA
ccaccactgcgggcgtacc

SEQ ID NO: 1716 - RNA, 19 nt, synthetic construct
  misc_feature 1..19: note = Description of Artificial Sequence: Synthetic oligonucleotide
  source 1..19: mol_type = other RNA
caccactgcgggcgtacct

SEQ ID NO: 1717 - RNA, 19 nt, synthetic construct
  misc_feature 1..19: note = Description of Artificial Sequence: Synthetic oligonucleotide
  source 1..19: mol_type = other RNA
accactgcgggcgtacctt

SEQ ID NO: 1718 - RNA, 19 nt, synthetic construct
  misc_feature 1..19: note = Description of Artificial Sequence: Synthetic oligonucleotide
  source 1..19: mol_type = other RNA
ccactgcgggcgtaccttg

SEQ ID NO: 1719 - RNA, 19 nt, synthetic construct
  misc_feature 1..19: note = Description of Artificial Sequence: Synthetic oligonucleotide
  source 1..19: mol_type = other RNA
cactgcgggcgtaccttgc

SEQ ID NO: 1720 - RNA, 19 nt, synthetic construct
  misc_feature 1..19: note = Description of Artificial Sequence: Synthetic oligonucleotide
  source 1..19: mol_type = other RNA
actgcgggcgtaccttgcc

SEQ ID NO: 1721 - RNA, 19 nt, synthetic construct
  misc_feature 1..19: note = Description of Artificial Sequence: Synthetic oligonucleotide
  source 1..19: mol_type = other RNA
ctgcgggcgtaccttgcca

SEQ ID NO: 1722 - RNA, 19 nt, synthetic construct
  misc_feature 1..19: note = Description of Artificial Sequence: Synthetic oligonucleotide
  source 1..19: mol_type = other RNA
tgcgggcgtaccttgccag

SEQ ID NO: 1723 - RNA, 19 nt, synthetic construct
  misc_feature 1..19: note = Description of Artificial Sequence: Synthetic oligonucleotide
  source 1..19: mol_type = other RNA
gcgggcgtaccttgccagc

SEQ ID NO: 1724 - RNA, 19 nt, synthetic construct
  misc_feature 1..19: note = Description of Artificial Sequence: Synthetic oligonucleotide
  source 1..19: mol_type = other RNA
cgggcgtaccttgccagcg

SEQ ID NO: 1725 - RNA, 19 nt, synthetic construct
  misc_feature 1..19: note = Description of Artificial Sequence: Synthetic oligonucleotide
  source 1..19: mol_type = other RNA
gggcgtaccttgccagcgt

SEQ ID NO: 1726 - RNA, 19 nt, synthetic construct
  misc_feature 1..19: note = Description of Artificial Sequence: Synthetic oligonucleotide
  source 1..19: mol_type = other RNA
ggcgtaccttgccagcgtt

SEQ ID NO: 1727 - RNA, 19 nt, synthetic construct
  misc_feature 1..19: note = Description of Artificial Sequence: Synthetic oligonucleotide
  source 1..19: mol_type = other RNA
gcgtaccttgccagcgttg

SEQ ID NO: 1728 - RNA, 19 nt, synthetic construct
  misc_feature 1..19: note = Description of Artificial Sequence: Synthetic oligonucleotide
  source 1..19: mol_type = other RNA
cgtaccttgccagcgttgg

SEQ ID NO: 1729 - RNA, 19 nt, synthetic construct
  misc_feature 1..19: note = Description of Artificial Sequence: Synthetic oligonucleotide
  source 1..19: mol_type = other RNA
gtaccttgccagcgttggg

SEQ ID NO: 1730 - RNA, 19 nt, synthetic construct
  misc_feature 1..19: note = Description of Artificial Sequence: Synthetic oligonucleotide
  source 1..19: mol_type = other RNA
taccttgccagcgttggga

SEQ ID NO: 1731 - RNA, 19 nt, synthetic construct
  misc_feature 1..19: note = Description of Artificial Sequence: Synthetic oligonucleotide
  source 1..19: mol_type = other RNA
accttgccagcgttgggac

SEQ ID NO: 1732 - RNA, 19 nt, synthetic construct
  misc_feature 1..19: note = Description of Artificial Sequence: Synthetic oligonucleotide
  source 1..19: mol_type = other RNA
ccttgccagcgttgggacg

SEQ ID NO: 1733 - RNA, 19 nt, synthetic construct
  misc_feature 1..19: note = Description of Artificial Sequence: Synthetic oligonucleotide
  source 1..19: mol_type = other RNA
cttgccagcgttgggacgc

SEQ ID NO: 1734 - RNA, 19 nt, synthetic construct
  misc_feature 1..19: note = Description of Artificial Sequence: Synthetic oligonucleotide
  source 1..19: mol_type = other RNA
ttgccagcgttgggacgcg

SEQ ID NO: 1735 - RNA, 19 nt, synthetic construct
  misc_feature 1..19: note = Description of Artificial Sequence: Synthetic oligonucleotide
  source 1..19: mol_type = other RNA
tgccagcgttgggacgcgc

SEQ ID NO: 1736 - RNA, 19 nt, synthetic construct
  misc_feature 1..19: note = Description of Artificial Sequence: Synthetic oligonucleotide
  source 1..19: mol_type = other RNA
gccagcgttgggacgcgca

SEQ ID NO: 1737 - RNA, 19 nt, synthetic construct
  misc_feature 1..19: note = Description of Artificial Sequence: Synthetic oligonucleotide
  source 1..19: mol_type = other RNA
ccagcgttgggacgcgcaa

SEQ ID NO: 1738 - RNA, 19 nt, synthetic construct
  misc_feature 1..19: note = Description of Artificial Sequence: Synthetic oligonucleotide
  source 1..19: mol_type = other RNA
cagcgttgggacgcgcaaa

SEQ ID NO: 1739 - RNA, 19 nt, synthetic construct
  misc_feature 1..19: note = Description of Artificial Sequence: Synthetic oligonucleotide
  source 1..19: mol_type = other RNA
agcgttgggacgcgcaaat

SEQ ID NO: 1740 - RNA, 19 nt, synthetic construct
  misc_feature 1..19: note = Description of Artificial Sequence: Synthetic oligonucleotide
  source 1..19: mol_type = other RNA
gcgttgggacgcgcaaatc

SEQ ID NO: 1741 - RNA, 19 nt, synthetic construct
  misc_feature 1..19: note = Description of Artificial Sequence: Synthetic oligonucleotide
  source 1..19: mol_type = other RNA
cgttgggacgcgcaaatcc

SEQ ID NO: 1742 - RNA, 19 nt, synthetic construct
  misc_feature 1..19: note = Description of Artificial Sequence: Synthetic oligonucleotide
  source 1..19: mol_type = other RNA
gttgggacgcgcaaatccc

SEQ ID NO: 1743 - RNA, 19 nt, synthetic construct
  misc_feature 1..19: note = Description of Artificial Sequence: Synthetic oligonucleotide
  source 1..19: mol_type = other RNA
ttgggacgcgcaaatcccg

SEQ ID NO: 1744 - RNA, 19 nt, synthetic construct
  misc_feature 1..19: note = Description of Artificial Sequence: Synthetic oligonucleotide
  source 1..19: mol_type = other RNA
tgggacgcgcaaatcccgc

SEQ ID NO: 1745 - RNA, 19 nt, synthetic construct
  misc_feature 1..19: note = Description of Artificial Sequence: Synthetic oligonucleotide
  source 1..19: mol_type = other RNA
gggacgcgcaaatcccgca

SEQ ID NO: 1746 - RNA, 19 nt, synthetic construct
  misc_feature 1..19: note = Description of Artificial Sequence: Synthetic oligonucleotide
  source 1..19: mol_type = other RNA
ggacgcgcaaatcccgcat

SEQ ID NO: 1747 - RNA, 19 nt, synthetic construct
  misc_feature 1..19: note = Description of Artificial Sequence: Synthetic oligonucleotide
  source 1..19: mol_type = other RNA
gacgcgcaaatcccgcatc

SEQ ID NO: 1748 - RNA, 19 nt, synthetic construct
  misc_feature 1..19: note = Description of Artificial Sequence: Synthetic oligonucleotide
  source 1..19: mol_type = other RNA
acgcgcaaatcccgcatca

SEQ ID NO: 1749 - RNA, 19 nt, synthetic construct
  misc_feature 1..19: note = Description of Artificial Sequence: Synthetic oligonucleotide
  source 1..19: mol_type = other RNA
cgcgcaaatcccgcatcag

SEQ ID NO: 1750 - RNA, 19 nt, synthetic construct
  misc_feature 1..19: note = Description of Artificial Sequence: Synthetic oligonucleotide
  source 1..19: mol_type = other RNA
gcgcaaatcccgcatcagc

SEQ ID NO: 1751 - RNA, 19 nt, synthetic construct
  misc_feature 1..19: note = Description of Artificial Sequence: Synthetic oligonucleotide
  source 1..19: mol_type = other RNA
cgcaaatcccgcatcagca

SEQ ID NO: 1752 - RNA, 19 nt, synthetic construct
  misc_feature 1..19: note = Description of Artificial Sequence: Synthetic oligonucleotide
  source 1..19: mol_type = other RNA
gcaaatcccgcatcagcac

SEQ ID NO: 1753 - RNA, 19 nt, synthetic construct
  misc_feature 1..19: note = Description of Artificial Sequence: Synthetic oligonucleotide
  source 1..19: mol_type = other RNA
caaatcccgcatcagcacc

SEQ ID NO: 1754 - RNA, 19 nt, synthetic construct
  misc_feature 1..19: note = Description of Artificial Sequence: Synthetic oligonucleotide
  source 1..19: mol_type = other RNA
aaatcccgcatcagcaccg

SEQ ID NO: 1755 - RNA, 19 nt, synthetic construct
  misc_feature 1..19: note = Description of Artificial Sequence: Synthetic oligonucleotide
  source 1..19: mol_type = other RNA
aatcccgcatcagcaccga

SEQ ID NO: 1756 - RNA, 19 nt, synthetic construct
  misc_feature 1..19: note = Description of Artificial Sequence: Synthetic oligonucleotide
  source 1..19: mol_type = other RNA
atcccgcatcagcaccgat

SEQ ID NO: 1757 - RNA, 19 nt, synthetic construct
  misc_feature 1..19: note = Description of Artificial Sequence: Synthetic oligonucleotide
  source 1..19: mol_type = other RNA
tcccgcatcagcaccgatt

SEQ ID NO: 1758 - RNA, 19 nt, synthetic construct
  misc_feature 1..19: note = Description of Artificial Sequence: Synthetic oligonucleotide
  source 1..19: mol_type = other RNA
cccgcatcagcaccgattt

SEQ ID NO: 1759 - RNA, 19 nt, synthetic construct
  misc_feature 1..19: note = Description of Artificial Sequence: Synthetic oligonucleotide
  source 1..19: mol_type = other RNA
ccgcatcagcaccgattta

SEQ ID NO: 1760 - RNA, 19 nt, synthetic construct
  misc_feature 1..19: note = Description of Artificial Sequence: Synthetic oligonucleotide
  source 1..19: mol_type = other RNA
cgcatcagcaccgatttac

SEQ ID NO: 1761 - RNA, 19 nt, synthetic construct
  misc_feature 1..19: note = Description of Artificial Sequence: Synthetic oligonucleotide
  source 1..19: mol_type = other RNA
gcatcagcaccgatttacg

SEQ ID NO: 1762 - RNA, 19 nt, synthetic construct
  misc_feature 1..19: note = Description of Artificial Sequence: Synthetic oligonucleotide
  source 1..19: mol_type = other RNA
catcagcaccgatttacgc

SEQ ID NO: 1763 - RNA, 19 nt, synthetic construct
  misc_feature 1..19: note = Description of Artificial Sequence: Synthetic oligonucleotide
  source 1..19: mol_type = other RNA
atcagcaccgatttacgcc

SEQ ID NO: 1764 - RNA, 19 nt, synthetic construct
  misc_feature 1..19: note = Description of Artificial Sequence: Synthetic oligonucleotide
  source 1..19: mol_type = other RNA
tcagcaccgatttacgcca

SEQ ID NO: 1765 - RNA, 19 nt, synthetic construct
  misc_feature 1..19: note = Description of Artificial Sequence: Synthetic oligonucleotide
  source 1..19: mol_type = other RNA
cagcaccgatttacgccag

SEQ ID NO: 1766 - RNA, 19 nt, synthetic construct
  misc_feature 1..19: note = Description of Artificial Sequence: Synthetic oligonucleotide
  source 1..19: mol_type = other RNA
agcaccgatttacgccaga

SEQ ID NO: 1767 - RNA, 19 nt, synthetic construct
  misc_feature 1..19: note = Description of Artificial Sequence: Synthetic oligonucleotide
  source 1..19: mol_type = other RNA
gcaccgatttacgccagaa

SEQ ID NO: 1768 - RNA, 19 nt, synthetic construct
  misc_feature 1..19: note = Description of Artificial Sequence: Synthetic oligonucleotide
  source 1..19: mol_type = other RNA
caccgatttacgccagaaa

SEQ ID NO: 1769 - RNA, 19 nt, synthetic construct
  misc_feature 1..19: note = Description of Artificial Sequence: Synthetic oligonucleotide
  source 1..19: mol_type = other RNA
accgatttacgccagaaaa

SEQ ID NO: 1770 - RNA, 19 nt, synthetic construct
  misc_feature 1..19: note = Description of Artificial Sequence: Synthetic oligonucleotide
  source 1..19: mol_type = other RNA
ccgatttacgccagaaaaa

SEQ ID NO: 1771 - RNA, 19 nt, synthetic construct
  misc_feature 1..19: note = Description of Artificial Sequence: Synthetic oligonucleotide
  source 1..19: mol_type = other RNA
cgatttacgccagaaaaat

SEQ ID NO: 1772 - RNA, 19 nt, synthetic construct
  misc_feature 1..19: note = Description of Artificial Sequence: Synthetic oligonucleotide
  source 1..19: mol_type = other RNA
gatttacgccagaaaaata

SEQ ID NO: 1773 - RNA, 19 nt, synthetic construct
  misc_feature 1..19: note = Description of Artificial Sequence: Synthetic oligonucleotide
  source 1..19: mol_type = other RNA
atttacgccagaaaaatac

SEQ ID NO: 1774 - RNA, 19 nt, synthetic construct
  misc_feature 1..19: note = Description of Artificial Sequence: Synthetic oligonucleotide
  source 1..19: mol_type = other RNA
tttacgccagaaaaatacg

SEQ ID NO: 1775 - RNA, 19 nt, synthetic construct
  misc_feature 1..19: note = Description of Artificial Sequence: Synthetic oligonucleotide
  source 1..19: mol_type = other RNA
ttacgccagaaaaatacgc

SEQ ID NO: 1776 - RNA, 19 nt, synthetic construct
  misc_feature 1..19: note = Description of Artificial Sequence: Synthetic oligonucleotide
  source 1..19: mol_type = other RNA
tacgccagaaaaatacgcg

SEQ ID NO: 1777 - RNA, 19 nt, synthetic construct
  misc_feature 1..19: note = Description of Artificial Sequence: Synthetic oligonucleotide
  source 1..19: mol_type = other RNA
acgccagaaaaatacgcgt

SEQ ID NO: 1778 - RNA, 19 nt, synthetic construct
  misc_feature 1..19: note = Description of Artificial Sequence: Synthetic oligonucleotide
  source 1..19: mol_type = other RNA
cgccagaaaaatacgcgtg

SEQ ID NO: 1779 - RNA, 19 nt, synthetic construct
  misc_feature 1..19: note = Description of Artificial Sequence: Synthetic oligonucleotide
  source 1..19: mol_type = other RNA
gccagaaaaatacgcgtgc

SEQ ID NO: 1780 - RNA, 19 nt, synthetic construct
  misc_feature 1..19: note = Description of Artificial Sequence: Synthetic oligonucleotide
  source 1..19: mol_type = other RNA
ccagaaaaatacgcgtgca

SEQ ID NO: 1781 - RNA, 19 nt, synthetic construct
  misc_feature 1..19: note = Description of Artificial Sequence: Synthetic oligonucleotide
  source 1..19: mol_type = other RNA
cagaaaaatacgcgtgcaa

SEQ ID NO: 1782 - RNA, 19 nt, synthetic construct
  misc_feature 1..19: note = Description of Artificial Sequence: Synthetic oligonucleotide
  source 1..19: mol_type = other RNA
agaaaaatacgcgtgcaaa

SEQ ID NO: 1783 - RNA, 19 nt, synthetic construct
  misc_feature 1..19: note = Description of Artificial Sequence: Synthetic oligonucleotide
  source 1..19: mol_type = other RNA
gaaaaatacgcgtgcaaag

SEQ ID NO: 1784 - RNA, 19 nt, synthetic construct
  misc_feature 1..19: note = Description of Artificial Sequence: Synthetic oligonucleotide
  source 1..19: mol_type = other RNA
aaaaatacgcgtgcaaaga

SEQ ID NO: 1785 - RNA, 19 nt, synthetic construct
  misc_feature 1..19: note = Description of Artificial Sequence: Synthetic oligonucleotide
  source 1..19: mol_type = other RNA
aaaatacgcgtgcaaagac

SEQ ID NO: 1786 - RNA, 19 nt, synthetic construct
  misc_feature 1..19: note = Description of Artificial Sequence: Synthetic oligonucleotide
  source 1..19: mol_type = other RNA
aaatacgcgtgcaaagacc

SEQ ID NO: 1787 - RNA, 19 nt, synthetic construct
  misc_feature 1..19: note = Description of Artificial Sequence: Synthetic oligonucleotide
  source 1..19: mol_type = other RNA
aatacgcgtgcaaagacct

SEQ ID NO: 1788 - RNA, 19 nt, synthetic construct
  misc_feature 1..19: note = Description of Artificial Sequence: Synthetic oligonucleotide
  source 1..19: mol_type = other RNA
atacgcgtgcaaagacctt

SEQ ID NO: 1789 - RNA, 19 nt, synthetic construct
  misc_feature 1..19: note = Description of Artificial Sequence: Synthetic oligonucleotide
  source 1..19: mol_type = other RNA
tacgcgtgcaaagaccttc

SEQ ID NO: 1790 - RNA, 19 nt, synthetic construct
  misc_feature 1..19: note = Description of Artificial Sequence: Synthetic oligonucleotide
  source 1..19: mol_type = other RNA
acgcgtgcaaagaccttcg

SEQ ID NO: 1791 - RNA, 19 nt, synthetic construct
  misc_feature 1..19: note = Description of Artificial Sequence: Synthetic oligonucleotide
  source 1..19: mol_type = other RNA
cgcgtgcaaagaccttcgg

SEQ ID NO: 1792 - RNA, 19 nt, synthetic construct
  misc_feature 1..19: note = Description of Artificial Sequence: Synthetic oligonucleotide
  source 1..19: mol_type = other RNA
gcgtgcaaagaccttcggg

SEQ ID NO: 1793 - RNA, 19 nt, synthetic construct
  misc_feature 1..19: note = Description of Artificial Sequence: Synthetic oligonucleotide
  source 1..19: mol_type = other RNA
cgtgcaaagaccttcggga

SEQ ID NO: 1794 - RNA, 19 nt, synthetic construct
  misc_feature 1..19: note = Description of Artificial Sequence: Synthetic oligonucleotide
  source 1..19: mol_type = other RNA
gtgcaaagaccttcgggag

SEQ ID NO: 1795 - RNA, 19 nt, synthetic construct
  misc_feature 1..19: note = Description of Artificial Sequence: Synthetic oligonucleotide
  source 1..19: mol_type = other RNA
tgcaaagaccttcgggaga

SEQ ID NO: 1796 - RNA, 19 nt, synthetic construct
  misc_feature 1..19: note = Description of Artificial Sequence: Synthetic oligonucleotide
  source 1..19: mol_type = other RNA
gcaaagaccttcgggagaa

SEQ ID NO: 1797 - RNA, 19 nt, synthetic construct
  misc_feature 1..19: note = Description of Artificial Sequence: Synthetic oligonucleotide
  source 1..19: mol_type = other RNA
caaagaccttcgggagaac

SEQ ID NO: 1798 - RNA, 19 nt, synthetic construct
  misc_feature 1..19: note = Description of Artificial Sequence: Synthetic oligonucleotide
  source 1..19: mol_type = other RNA
aaagaccttcgggagaact

SEQ ID NO: 1799 - RNA, 19 nt, synthetic construct
  misc_feature 1..19: note = Description of Artificial Sequence: Synthetic oligonucleotide
  source 1..19: mol_type = other RNA
aagaccttcgggagaactt

SEQ ID NO: 1800 - RNA, 19 nt, synthetic construct
  misc_feature 1..19: note = Description of Artificial Sequence: Synthetic oligonucleotide
  source 1..19: mol_type = other RNA
agaccttcgggagaacttc

SEQ ID NO: 1801 - RNA, 19 nt, synthetic construct
  misc_feature 1..19: note = Description of Artificial Sequence: Synthetic oligonucleotide
  source 1..19: mol_type = other RNA
gaccttcgggagaacttct

SEQ ID NO: 1802 - RNA, 19 nt, synthetic construct
  misc_feature 1..19: note = Description of Artificial Sequence: Synthetic oligonucleotide
  source 1..19: mol_type = other RNA
accttcgggagaacttctg

SEQ ID NO: 1803 - RNA, 19 nt, synthetic construct
  misc_feature 1..19: note = Description of Artificial Sequence: Synthetic oligonucleotide
  source 1..19: mol_type = other RNA
ccttcgggagaacttctgc

SEQ ID NO: 1804 - RNA, 19 nt, synthetic construct
  misc_feature 1..19: note = Description of Artificial Sequence: Synthetic oligonucleotide
  source 1..19: mol_type = other RNA
cttcgggagaacttctgcc

SEQ ID NO: 1805 - RNA, 19 nt, synthetic construct
  misc_feature 1..19: note = Description of Artificial Sequence: Synthetic oligonucleotide
  source 1..19: mol_type = other RNA
ttcgggagaacttctgccg

SEQ ID NO: 1806 - RNA, 19 nt, synthetic construct
  misc_feature 1..19: note = Description of Artificial Sequence: Synthetic oligonucleotide
  source 1..19: mol_type = other RNA
tcgggagaacttctgccgg

SEQ ID NO: 1807 - RNA, 19 nt, synthetic construct
  misc_feature 1..19: note = Description of Artificial Sequence: Synthetic oligonucleotide
  source 1..19: mol_type = other RNA
cgggagaacttctgccgga

SEQ ID NO: 1808 - RNA, 19 nt, synthetic construct
  misc_feature 1..19: note = Description of Artificial Sequence: Synthetic oligonucleotide
  source 1..19: mol_type = other RNA
gggagaacttctgccggaa

SEQ ID NO: 1809 - RNA, 19 nt, synthetic construct
  misc_feature 1..19: note = Description of Artificial Sequence: Synthetic oligonucleotide
  source 1..19: mol_type = other RNA
ggagaacttctgccggaac

SEQ ID NO: 1810 - RNA, 19 nt, synthetic construct
  misc_feature 1..19: note = Description of Artificial Sequence: Synthetic oligonucleotide
  source 1..19: mol_type = other RNA
gagaacttctgccggaacc

SEQ ID NO: 1811 - RNA, 19 nt, synthetic construct
  misc_feature 1..19: note = Description of Artificial Sequence: Synthetic oligonucleotide
  source 1..19: mol_type = other RNA
agaacttctgccggaaccc

SEQ ID NO: 1812 - RNA, 19 nt, synthetic construct
  misc_feature 1..19: note = Description of Artificial Sequence: Synthetic oligonucleotide
  source 1..19: mol_type = other RNA
gaacttctgccggaacccc

SEQ ID NO: 1813 - RNA, 19 nt, synthetic construct
  misc_feature 1..19: note = Description of Artificial Sequence: Synthetic oligonucleotide
  source 1..19: mol_type = other RNA
aacttctgccggaaccccg

SEQ ID NO: 1814 - RNA, 19 nt, synthetic construct
  misc_feature 1..19: note = Description of Artificial Sequence: Synthetic oligonucleotide
  source 1..19: mol_type = other RNA
acttctgccggaaccccga

SEQ ID NO: 1815 - RNA, 19 nt, synthetic construct
  misc_feature 1..19: note = Description of Artificial Sequence: Synthetic oligonucleotide
  source 1..19: mol_type = other RNA
cttctgccggaaccccgac

SEQ ID NO: 1816 - RNA, 19 nt, synthetic construct
  misc_feature 1..19: note = Description of Artificial Sequence: Synthetic oligonucleotide
  source 1..19: mol_type = other RNA
ttctgccggaaccccgacg

SEQ ID NO: 1817 - RNA, 19 nt, synthetic construct
  misc_feature 1..19: note = Description of Artificial Sequence: Synthetic oligonucleotide
  source 1..19: mol_type = other RNA
tctgccggaaccccgacgg

SEQ ID NO: 1818 - RNA, 19 nt, synthetic construct
  misc_feature 1..19: note = Description of Artificial Sequence: Synthetic oligonucleotide
  source 1..19: mol_type = other RNA
ctgccggaaccccgacggc

SEQ ID NO: 1819 - RNA, 19 nt, synthetic construct
  misc_feature 1..19: note = Description of Artificial Sequence: Synthetic oligonucleotide
  source 1..19: mol_type = other RNA
tgccggaaccccgacggct

SEQ ID NO: 1820 - RNA, 19 nt, synthetic construct
  misc_feature 1..19: note = Description of Artificial Sequence: Synthetic oligonucleotide
  source 1..19: mol_type = other RNA
gccggaaccccgacggctc

SEQ ID NO: 1821 - RNA, 19 nt, synthetic construct
  misc_feature 1..19: note = Description of Artificial Sequence: Synthetic oligonucleotide
  source 1..19: mol_type = other RNA
ccggaaccccgacggctca

SEQ ID NO: 1822 - RNA, 19 nt, synthetic construct
  misc_feature 1..19: note = Description of Artificial Sequence: Synthetic oligonucleotide
  source 1..19: mol_type = other RNA
cggaaccccgacggctcag

SEQ ID NO: 1823 - RNA, 19 nt, synthetic construct
  misc_feature 1..19: note = Description of Artificial Sequence: Synthetic oligonucleotide
  source 1..19: mol_type = other RNA
ggaaccccgacggctcaga

SEQ ID NO: 1824 - RNA, 19 nt, synthetic construct
  misc_feature 1..19: note = Description of Artificial Sequence: Synthetic oligonucleotide
  source 1..19: mol_type = other RNA
gaaccccgacggctcagag

SEQ ID NO: 1825 - RNA, 19 nt, synthetic construct
  misc_feature 1..19: note = Description of Artificial Sequence: Synthetic oligonucleotide
  source 1..19: mol_type = other RNA
aaccccgacggctcagagg

SEQ ID NO: 1826 - RNA, 19 nt, synthetic construct
  misc_feature 1..19: note = Description of Artificial Sequence: Synthetic oligonucleotide
  source 1..19: mol_type = other RNA
accccgacggctcagaggc

SEQ ID NO: 1827 - RNA, 19 nt, synthetic construct
  misc_feature 1..19: note = Description of Artificial Sequence: Synthetic oligonucleotide
  source 1..19: mol_type = other RNA
ccccgacggctcagaggcg

SEQ ID NO: 1828 - RNA, 19 nt, synthetic construct
  misc_feature 1..19: note = Description of Artificial Sequence: Synthetic oligonucleotide
  source 1..19: mol_type = other RNA
cccgacggctcagaggcgc

SEQ ID NO: 1829 - RNA, 19 nt, synthetic construct
  misc_feature 1..19: note = Description of Artificial Sequence: Synthetic oligonucleotide
  source 1..19: mol_type = other RNA
ccgacggctcagaggcgcc

SEQ ID NO: 1830 - RNA, 19 nt, synthetic construct
  misc_feature 1..19: note = Description of Artificial Sequence: Synthetic oligonucleotide
  source 1..19: mol_type = other RNA
cgacggctcagaggcgccc

SEQ ID NO: 1831 - RNA, 19 nt, synthetic construct
  misc_feature 1..19: note = Description of Artificial Sequence: Synthetic oligonucleotide
  source 1..19: mol_type = other RNA
gacggctcagaggcgccct

SEQ ID NO: 1832 - RNA, 19 nt, synthetic construct
  misc_feature 1..19: note = Description of Artificial Sequence: Synthetic oligonucleotide
  source 1..19: mol_type = other RNA
acggctcagaggcgccctg

SEQ ID NO: 1833 - RNA, 19 nt, synthetic construct
  misc_feature 1..19: note = Description of Artificial Sequence: Synthetic oligonucleotide
  source 1..19: mol_type = other RNA
cggctcagaggcgccctgg

SEQ ID NO: 1834 - RNA, 19 nt, synthetic construct
  misc_feature 1..19: note = Description of Artificial Sequence: Synthetic oligonucleotide
  source 1..19: mol_type = other RNA
ggctcagaggcgccctggt

SEQ ID NO: 1835 - RNA, 19 nt, synthetic construct
  misc_feature 1..19: note = Description of Artificial Sequence: Synthetic oligonucleotide
  source 1..19: mol_type = other RNA
gctcagaggcgccctggtg

SEQ ID NO: 1836 - RNA, 19 nt, synthetic construct
  misc_feature 1..19: note = Description of Artificial Sequence: Synthetic oligonucleotide
  source 1..19: mol_type = other RNA
ctcagaggcgccctggtgc

SEQ ID NO: 1837 - RNA, 19 nt, synthetic construct
  misc_feature 1..19: note = Description of Artificial Sequence: Synthetic oligonucleotide
  source 1..19: mol_type = other RNA
tcagaggcgccctggtgct

SEQ ID NO: 1838 - RNA, 19 nt, synthetic construct
  misc_feature 1..19: note = Description of Artificial Sequence: Synthetic oligonucleotide
  source 1..19: mol_type = other RNA
cagaggcgccctggtgctt

SEQ ID NO: 1839 - RNA, 19 nt, synthetic construct
  misc_feature 1..19: note = Description of Artificial Sequence: Synthetic oligonucleotide
  source 1..19: mol_type = other RNA
agaggcgccctggtgcttc

SEQ ID NO: 1840 - RNA, 19 nt, synthetic construct
  misc_feature 1..19: note = Description of Artificial Sequence: Synthetic oligonucleotide
  source 1..19: mol_type = other RNA
gaggcgccctggtgcttca

SEQ ID NO: 1841 - RNA, 19 nt, synthetic construct
  misc_feature 1..19: note = Description of Artificial Sequence: Synthetic oligonucleotide
  source 1..19: mol_type = other RNA
aggcgccctggtgcttcac

SEQ ID NO: 1842 - RNA, 19 nt, synthetic construct
  misc_feature 1..19: note = Description of Artificial Sequence: Synthetic oligonucleotide
  source 1..19: mol_type = other RNA
ggcgccctggtgcttcaca

SEQ ID NO: 1843 - RNA, 19 nt, synthetic construct
  misc_feature 1..19: note = Description of Artificial Sequence: Synthetic oligonucleotide
  source 1..19: mol_type = other RNA
gcgccctggtgcttcacac

SEQ ID NO: 1844 - RNA, 19 nt, synthetic construct
  misc_feature 1..19: note = Description of Artificial Sequence: Synthetic oligonucleotide
  source 1..19: mol_type = other RNA
cgccctggtgcttcacact

SEQ ID NO: 1845 - RNA, 19 nt, synthetic construct
  misc_feature 1..19: note = Description of Artificial Sequence: Synthetic oligonucleotide
  source 1..19: mol_type = other RNA
gccctggtgcttcacactg

SEQ ID NO: 1846 - RNA, 19 nt, synthetic construct
  misc_feature 1..19: note = Description of Artificial Sequence: Synthetic oligonucleotide
  source 1..19: mol_type = other RNA
ccctggtgcttcacactgc

SEQ ID NO: 1847 - RNA, 19 nt, synthetic construct
  misc_feature 1..19: note = Description of Artificial Sequence: Synthetic oligonucleotide
  source 1..19: mol_type = other RNA
cctggtgcttcacactgcg

SEQ ID NO: 1848 - RNA, 19 nt, synthetic construct
  misc_feature 1..19: note = Description of Artificial Sequence: Synthetic oligonucleotide
  source 1..19: mol_type = other RNA
ctggtgcttcacactgcgg

SEQ ID NO: 1849 - RNA, 19 nt, synthetic construct
  misc_feature 1..19: note = Description of Artificial Sequence: Synthetic oligonucleotide
  source 1..19: mol_type = other RNA
tggtgcttcacactgcggc

SEQ ID NO: 1850 - RNA, 19 nt, synthetic construct
  misc_feature 1..19: note = Description of Artificial Sequence: Synthetic oligonucleotide
  source 1..19: mol_type = other RNA
ggtgcttcacactgcggcc

SEQ ID NO: 1851 - RNA, 19 nt, synthetic construct
  misc_feature 1..19: note = Description of Artificial Sequence: Synthetic oligonucleotide
  source 1..19: mol_type = other RNA
gtgcttcacactgcggccc

SEQ ID NO: 1852 - RNA, 19 nt, synthetic construct
  misc_feature 1..19: note = Description of Artificial Sequence: Synthetic oligonucleotide
  source 1..19: mol_type = other RNA
tgcttcacactgcggcccg

SEQ ID NO: 1853 - RNA, 19 nt, synthetic construct
  misc_feature 1..19: note = Description of Artificial Sequence: Synthetic oligonucleotide
  source 1..19: mol_type = other RNA
gcttcacactgcggcccgg

SEQ ID NO: 1854 - RNA, 19 nt, synthetic construct
  misc_feature 1..19: note = Description of Artificial Sequence: Synthetic oligonucleotide
  source 1..19: mol_type = other RNA
cttcacactgcggcccggc

SEQ ID NO: 1855 - RNA, 19 nt, synthetic construct
  misc_feature 1..19: note = Description of Artificial Sequence: Synthetic oligonucleotide
  source 1..19: mol_type = other RNA
ttcacactgcggcccggca

SEQ ID NO: 1856 - RNA, 19 nt, synthetic construct
  misc_feature 1..19: note = Description of Artificial Sequence: Synthetic oligonucleotide
  source 1..19: mol_type = other RNA
tcacactgcggcccggcat

SEQ ID NO: 1857 - RNA, 19 nt, synthetic construct
  misc_feature 1..19: note = Description of Artificial Sequence: Synthetic oligonucleotide
  source 1..19: mol_type = other RNA
cacactgcggcccggcatg

SEQ ID NO: 1858 - RNA, 19 nt, synthetic construct
  misc_feature 1..19: note = Description of Artificial Sequence: Synthetic oligonucleotide
  source 1..19: mol_type = other RNA
acactgcggcccggcatgc

SEQ ID NO: 1859 - RNA, 19 nt, synthetic construct
  misc_feature 1..19: note = Description of Artificial Sequence: Synthetic oligonucleotide
  source 1..19: mol_type = other RNA
cactgcggcccggcatgcg

SEQ ID NO: 1860 - RNA, 19 nt, synthetic construct
  misc_feature 1..19: note = Description of Artificial Sequence: Synthetic oligonucleotide
  source 1..19: mol_type = other RNA
actgcggcccggcatgcgc

SEQ ID NO: 1861 - RNA, 19 nt, synthetic construct
  misc_feature 1..19: note = Description of Artificial Sequence: Synthetic oligonucleotide
  source 1..19: mol_type = other RNA
ctgcggcccggcatgcgcg

SEQ ID NO: 1862 - RNA, 19 nt, synthetic construct
  misc_feature 1..19: note = Description of Artificial Sequence: Synthetic oligonucleotide
  source 1..19: mol_type = other RNA
tgcggcccggcatgcgcgc

SEQ ID NO: 1863 - RNA, 19 nt, synthetic construct
  misc_feature 1..19: note = Description of Artificial Sequence: Synthetic oligonucleotide
  source 1..19: mol_type = other RNA
gcggcccggcatgcgcgcg

SEQ ID NO: 1864 - RNA, 19 nt, synthetic construct
  misc_feature 1..19: note = Description of Artificial Sequence: Synthetic oligonucleotide
  source 1..19: mol_type = other RNA
cggcccggcatgcgcgcgg

SEQ ID NO: 1865 - RNA, 19 nt, synthetic construct
  misc_feature 1..19: note = Description of Artificial Sequence: Synthetic oligonucleotide
  source 1..19: mol_type = other RNA
ggcccggcatgcgcgcggc

SEQ ID NO: 1866 - RNA, 19 nt, synthetic construct
  misc_feature 1..19: note = Description of Artificial Sequence: Synthetic oligonucleotide
  source 1..19: mol_type = other RNA
gcccggcatgcgcgcggcc

SEQ ID NO: 1867 - RNA, 19 nt, synthetic construct
  misc_feature 1..19: note = Description of Artificial Sequence: Synthetic oligonucleotide
  source 1..19: mol_type = other RNA
cccggcatgcgcgcggcct

SEQ ID NO: 1868 - RNA, 19 nt, synthetic construct
  misc_feature 1..19: note = Description of Artificial Sequence: Synthetic oligonucleotide
  source 1..19: mol_type = other RNA
ccggcatgcgcgcggcctt

SEQ ID NO: 1869 - RNA, 19 nt, synthetic construct
  misc_feature 1..19: note = Description of Artificial Sequence: Synthetic oligonucleotide
  source 1..19: mol_type = other RNA
cggcatgcgcgcggccttt

SEQ ID NO: 1870 - RNA, 19 nt, synthetic construct
  misc_feature 1..19: note = Description of Artificial Sequence: Synthetic oligonucleotide
  source 1..19: mol_type = other RNA
ggcatgcgcgcggcctttt

SEQ ID NO: 1871 - RNA, 19 nt, synthetic construct
  misc_feature 1..19: note = Description of Artificial Sequence: Synthetic oligonucleotide
  source 1..19: mol_type = other RNA
gcatgcgcgcggccttttg

SEQ ID NO: 1872 - RNA, 19 nt, synthetic construct
  misc_feature 1..19: note = Description of Artificial Sequence: Synthetic oligonucleotide
  source 1..19: mol_type = other RNA
catgcgcgcggccttttgc

SEQ ID NO: 1873 - RNA, 19 nt, synthetic construct
  misc_feature 1..19: note = Description of Artificial Sequence: Synthetic oligonucleotide
  source 1..19: mol_type = other RNA
atgcgcgcggccttttgct

SEQ ID NO: 1874 - RNA, 19 nt, synthetic construct
  misc_feature 1..19: note = Description of Artificial Sequence: Synthetic oligonucleotide
  source 1..19: mol_type = other RNA
tgcgcgcggccttttgcta

SEQ ID NO: 1875 - RNA, 19 nt, synthetic construct
  misc_feature 1..19: note = Description of Artificial Sequence: Synthetic oligonucleotide
  source 1..19: mol_type = other RNA
gcgcgcggccttttgctac

SEQ ID NO: 1876 - RNA, 19 nt, synthetic construct
  misc_feature 1..19: note = Description of Artificial Sequence: Synthetic oligonucleotide
  source 1..19: mol_type = other RNA
cgcgcggccttttgctacc

SEQ ID NO: 1877 - RNA, 19 nt, synthetic construct
  misc_feature 1..19: note = Description of Artificial Sequence: Synthetic oligonucleotide
  source 1..19: mol_type = other RNA
gcgcggccttttgctacca

SEQ ID NO: 1878 - RNA, 19 nt, synthetic construct
  misc_feature 1..19: note = Description of Artificial Sequence: Synthetic oligonucleotide
  source 1..19: mol_type = other RNA
cgcggccttttgctaccag

SEQ ID NO: 1879 - RNA, 19 nt, synthetic construct
  misc_feature 1..19: note = Description of Artificial Sequence: Synthetic oligonucleotide
  source 1..19: mol_type = other RNA
gcggccttttgctaccaga

SEQ ID NO: 1880 - RNA, 19 nt, synthetic construct
  misc_feature 1..19: note = Description of Artificial Sequence: Synthetic oligonucleotide
  source 1..19: mol_type = other RNA
cggccttttgctaccagat

SEQ ID NO: 1881 - RNA, 19 nt, synthetic construct
  misc_feature 1..19: note = Description of Artificial Sequence: Synthetic oligonucleotide
  source 1..19: mol_type = other RNA
ggccttttgctaccagatc

SEQ ID NO: 1882 - RNA, 19 nt, synthetic construct
  misc_feature 1..19: note = Description of Artificial Sequence: Synthetic oligonucleotide
  source 1..19: mol_type = other RNA
gccttttgctaccagatcc

SEQ ID NO: 1883 - RNA, 19 nt, synthetic construct
  misc_feature 1..19: note = Description of Artificial Sequence: Synthetic oligonucleotide
  source 1..19: mol_type = other RNA
ccttttgctaccagatccg

SEQ ID NO: 1884 - RNA, 19 nt, synthetic construct
  misc_feature 1..19: note = Description of Artificial Sequence: Synthetic oligonucleotide
  source 1..19: mol_type = other RNA
cttttgctaccagatccgg

SEQ ID NO: 1885 - RNA, 19 nt, synthetic construct
  misc_feature 1..19: note = Description of Artificial Sequence: Synthetic oligonucleotide
  source 1..19: mol_type = other RNA
ttttgctaccagatccggc

SEQ ID NO: 1886 - RNA, 19 nt, synthetic construct
  misc_feature 1..19: note = Description of Artificial Sequence: Synthetic oligonucleotide
  source 1..19: mol_type = other RNA
tttgctaccagatccggcg

SEQ ID NO: 1887 - RNA, 19 nt, synthetic construct
  misc_feature 1..19: note = Description of Artificial Sequence: Synthetic oligonucleotide
  source 1..19: mol_type = other RNA
ttgctaccagatccggcgt

SEQ ID NO: 1888 - RNA, 19 nt, synthetic construct
  misc_feature 1..19: note = Description of Artificial Sequence: Synthetic oligonucleotide
  source 1..19: mol_type = other RNA
tgctaccagatccggcgtt

SEQ ID NO: 1889 - RNA, 19 nt, synthetic construct
  misc_feature 1..19: note = Description of Artificial Sequence: Synthetic oligonucleotide
  source 1..19: mol_type = other RNA
gctaccagatccggcgttg

SEQ ID NO: 1890 - RNA, 19 nt, synthetic construct
  misc_feature 1..19: note = Description of Artificial Sequence: Synthetic oligonucleotide
  source 1..19: mol_type = other RNA
ctaccagatccggcgttgt

SEQ ID NO: 1891 - RNA, 19 nt, synthetic construct
  misc_feature 1..19: note = Description of Artificial Sequence: Synthetic oligonucleotide
  source 1..19: mol_type = other RNA
taccagatccggcgttgta

SEQ ID NO: 1892 - RNA, 19 nt, synthetic construct
  misc_feature 1..19: note = Description of Artificial Sequence: Synthetic oligonucleotide
  source 1..19: mol_type = other RNA
accagatccggcgttgtac

SEQ ID NO: 1893 - RNA, 19 nt, synthetic construct
  misc_feature 1..19: note = Description of Artificial Sequence: Synthetic oligonucleotide
  source 1..19: mol_type = other RNA
ccagatccggcgttgtaca

SEQ ID NO: 1894 - RNA, 19 nt, synthetic construct
  misc_feature 1..19: note = Description of Artificial Sequence: Synthetic oligonucleotide
  source 1..19: mol_type = other RNA
cagatccggcgttgtacag

SEQ ID NO: 1895 - RNA, 19 nt, synthetic construct
  misc_feature 1..19: note = Description of Artificial Sequence: Synthetic oligonucleotide
  source 1..19: mol_type = other RNA
agatccggcgttgtacaga

SEQ ID NO: 1896 - RNA, 19 nt, synthetic construct
  misc_feature 1..19: note = Description of Artificial Sequence: Synthetic oligonucleotide
  source 1..19: mol_type = other RNA
gatccggcgttgtacagac

SEQ ID NO: 1897 - RNA, 19 nt, synthetic construct
  misc_feature 1..19: note = Description of Artificial Sequence: Synthetic oligonucleotide
  source 1..19: mol_type = other RNA
atccggcgttgtacagacg

SEQ ID NO: 1898 - RNA, 19 nt, synthetic construct
  misc_feature 1..19: note = Description of Artificial Sequence: Synthetic oligonucleotide
  source 1..19: mol_type = other RNA
tccggcgttgtacagacga

SEQ ID NO: 1899 - RNA, 19 nt, synthetic construct
  misc_feature 1..19: note = Description of Artificial Sequence: Synthetic oligonucleotide
  source 1..19: mol_type = other RNA
ccggcgttgtacagacgac

SEQ ID NO: 1900 - RNA, 19 nt, synthetic construct
  misc_feature 1..19: note = Description of Artificial Sequence: Synthetic oligonucleotide
  source 1..19: mol_type = other RNA
cggcgttgtacagacgacg

SEQ ID NO: 1901 - RNA, 19 nt, synthetic construct
  misc_feature 1..19: note = Description of Artificial Sequence: Synthetic oligonucleotide
  source 1..19: mol_type = other RNA
ggcgttgtacagacgacgt

SEQ ID NO: 1902 - RNA, 19 nt, synthetic construct
  misc_feature 1..19: note = Description of Artificial Sequence: Synthetic oligonucleotide
  source 1..19: mol_type = other RNA
gcgttgtacagacgacgtg

SEQ ID NO: 1903 - RNA, 19 nt, synthetic construct
  misc_feature 1..19: note = Description of Artificial Sequence: Synthetic oligonucleotide
  source 1..19: mol_type = other RNA
cgttgtacagacgacgtgc

SEQ ID NO: 1904 - RNA, 19 nt, synthetic construct
  misc_feature 1..19: note = Description of Artificial Sequence: Synthetic oligonucleotide
  source 1..19: mol_type = other RNA
gttgtacagacgacgtgcg

SEQ ID NO: 1905 - RNA, 19 nt, synthetic construct
  misc_feature 1..19: note = Description of Artificial Sequence: Synthetic oligonucleotide
  source 1..19: mol_type = other RNA
ttgtacagacgacgtgcgg

SEQ ID NO: 1906 - RNA, 19 nt, synthetic construct
  misc_feature 1..19: note = Description of Artificial Sequence: Synthetic oligonucleotide
  source 1..19: mol_type = other RNA
tgtacagacgacgtgcggc

SEQ ID NO: 1907 - RNA, 19 nt, synthetic construct
  misc_feature 1..19: note = Description of Artificial Sequence: Synthetic oligonucleotide
  source 1..19: mol_type = other RNA
gtacagacgacgtgcggcc

SEQ ID NO: 1908 - RNA, 19 nt, synthetic construct
  misc_feature 1..19: note = Description of Artificial Sequence: Synthetic oligonucleotide
  source 1..19: mol_type = other RNA
tacagacgacgtgcggccc

SEQ ID NO: 1909 - RNA, 19 nt, synthetic construct
  misc_feature 1..19: note = Description of Artificial Sequence: Synthetic oligonucleotide
  source 1..19: mol_type = other RNA
acagacgacgtgcggcccc

SEQ ID NO: 1910 - RNA, 19 nt, synthetic construct
  misc_feature 1..19: note = Description of Artificial Sequence: Synthetic oligonucleotide
  source 1..19: mol_type = other RNA
cagacgacgtgcggcccca

SEQ ID NO: 1911 - RNA, 19 nt, synthetic construct
  misc_feature 1..19: note = Description of Artificial Sequence: Synthetic oligonucleotide
  source 1..19: mol_type = other RNA
agacgacgtgcggccccag

SEQ ID NO: 1912 - RNA, 19 nt, synthetic construct
  misc_feature 1..19: note = Description of Artificial Sequence: Synthetic oligonucleotide
  source 1..19: mol_type = other RNA
gacgacgtgcggccccagg

SEQ ID NO: 1913 - RNA, 19 nt, synthetic construct
  misc_feature 1..19: note = Description of Artificial Sequence: Synthetic oligonucleotide
  source 1..19: mol_type = other RNA
acgacgtgcggccccagga

SEQ ID NO: 1914 - RNA, 19 nt, synthetic construct
  misc_feature 1..19: note = Description of Artificial Sequence: Synthetic oligonucleotide
  source 1..19: mol_type = other RNA
cgacgtgcggccccaggac

SEQ ID NO: 1915 - RNA, 19 nt, synthetic construct
  misc_feature 1..19: note = Description of Artificial Sequence: Synthetic oligonucleotide
  source 1..19: mol_type = other RNA
gacgtgcggccccaggact

SEQ ID NO: 1916 - RNA, 19 nt, synthetic construct
  misc_feature 1..19: note = Description of Artificial Sequence: Synthetic oligonucleotide
  source 1..19: mol_type = other RNA
acgtgcggccccaggactg

SEQ ID NO: 1917 - RNA, 19 nt, synthetic construct
  misc_feature 1..19: note = Description of Artificial Sequence: Synthetic oligonucleotide
  source 1..19: mol_type = other RNA
cgtgcggccccaggactgc

SEQ ID NO: 1918 - RNA, 19 nt, synthetic construct
  misc_feature 1..19: note = Description of Artificial Sequence: Synthetic oligonucleotide
  source 1..19: mol_type = other RNA
gtgcggccccaggactgct

SEQ ID NO: 1919 - RNA, 19 nt, synthetic construct
  misc_feature 1..19: note = Description of Artificial Sequence: Synthetic oligonucleotide
  source 1..19: mol_type = other RNA
tgcggccccaggactgcta

SEQ ID NO: 1920 - RNA, 19 nt, synthetic construct
  misc_feature 1..19: note = Description of Artificial Sequence: Synthetic oligonucleotide
  source 1..19: mol_type = other RNA
gcggccccaggactgctac

SEQ ID NO: 1921 - RNA, 19 nt, synthetic construct
  misc_feature 1..19: note = Description of Artificial Sequence: Synthetic oligonucleotide
  source 1..19: mol_type = other RNA
cggccccaggactgctacc

SEQ ID NO: 1922 - RNA, 19 nt, synthetic construct
  misc_feature 1..19: note = Description of Artificial Sequence: Synthetic oligonucleotide
  source 1..19: mol_type = other RNA
ggccccaggactgctacca

SEQ ID NO: 1923 - RNA, 19 nt, synthetic construct
  misc_feature 1..19: note = Description of Artificial Sequence: Synthetic oligonucleotide
  source 1..19: mol_type = other RNA
gccccaggactgctaccac

SEQ ID NO: 1924 - RNA, 19 nt, synthetic construct
  misc_feature 1..19: note = Description of Artificial Sequence: Synthetic oligonucleotide
  source 1..19: mol_type = other RNA
ccccaggactgctaccacg

SEQ ID NO: 1925 - RNA, 19 nt, synthetic construct
  misc_feature 1..19: note = Description of Artificial Sequence: Synthetic oligonucleotide
  source 1..19: mol_type = other RNA
cccaggactgctaccacgg

SEQ ID NO: 1926 - RNA, 19 nt, synthetic construct
  misc_feature 1..19: note = Description of Artificial Sequence: Synthetic oligonucleotide
  source 1..19: mol_type = other RNA
ccaggactgctaccacggc

SEQ ID NO: 1927 - RNA, 19 nt, synthetic construct
  misc_feature 1..19: note = Description of Artificial Sequence: Synthetic oligonucleotide
  source 1..19: mol_type = other RNA
caggactgctaccacggcg

SEQ ID NO: 1928 - RNA, 19 nt, synthetic construct
  misc_feature 1..19: note = Description of Artificial Sequence: Synthetic oligonucleotide
  source 1..19: mol_type = other RNA
aggactgctaccacggcgc

SEQ ID NO: 1929 - RNA, 19 nt, synthetic construct
  misc_feature 1..19: note = Description of Artificial Sequence: Synthetic oligonucleotide
  source 1..19: mol_type = other RNA
ggactgctaccacggcgca

SEQ ID NO: 1930 - RNA, 19 nt, synthetic construct
  misc_feature 1..19: note = Description of Artificial Sequence: Synthetic oligonucleotide
  source 1..19: mol_type = other RNA
gactgctaccacggcgcag

SEQ ID NO: 1931 - RNA, 19 nt, synthetic construct
  misc_feature 1..19: note = Description of Artificial Sequence: Synthetic oligonucleotide
  source 1..19: mol_type = other RNA
actgctaccacggcgcagg

SEQ ID NO: 1932 - RNA, 19 nt, synthetic construct
  misc_feature 1..19: note = Description of Artificial Sequence: Synthetic oligonucleotide
  source 1..19: mol_type = other RNA
ctgctaccacggcgcaggg

SEQ ID NO: 1933 - RNA, 19 nt, synthetic construct
  misc_feature 1..19: note = Description of Artificial Sequence: Synthetic oligonucleotide
  source 1..19: mol_type = other RNA
tgctaccacggcgcagggg

SEQ ID NO: 1934 - RNA, 19 nt, synthetic construct
  misc_feature 1..19: note = Description of Artificial Sequence: Synthetic oligonucleotide
  source 1..19: mol_type = other RNA
gctaccacggcgcagggga

SEQ ID NO: 1935 - RNA, 19 nt, synthetic construct
  misc_feature 1..19: note = Description of Artificial Sequence: Synthetic oligonucleotide
  source 1..19: mol_type = other RNA
ctaccacggcgcaggggag

SEQ ID NO: 1936 - RNA, 19 nt, synthetic construct
  misc_feature 1..19: note = Description of Artificial Sequence: Synthetic oligonucleotide
  source 1..19: mol_type = other RNA
taccacggcgcaggggagc

SEQ ID NO: 1937 - RNA, 19 nt, synthetic construct
  misc_feature 1..19: note = Description of Artificial Sequence: Synthetic oligonucleotide
  source 1..19: mol_type = other RNA
accacggcgcaggggagca

SEQ ID NO: 1938 - RNA, 19 nt, synthetic construct
  misc_feature 1..19: note = Description of Artificial Sequence: Synthetic oligonucleotide
  source 1..19: mol_type = other RNA
ccacggcgcaggggagcag

SEQ ID NO: 1939 - RNA, 19 nt, synthetic construct
  misc_feature 1..19: note = Description of Artificial Sequence: Synthetic oligonucleotide
  source 1..19: mol_type = other RNA
cacggcgcaggggagcagt

SEQ ID NO: 1940 - RNA, 19 nt, synthetic construct
  misc_feature 1..19: note = Description of Artificial Sequence: Synthetic oligonucleotide
  source 1..19: mol_type = other RNA
acggcgcaggggagcagta

SEQ ID NO: 1941 - RNA, 19 nt, synthetic construct
  misc_feature 1..19: note = Description of Artificial Sequence: Synthetic oligonucleotide
  source 1..19: mol_type = other RNA
cggcgcaggggagcagtac

SEQ ID NO: 1942 - RNA, 19 nt, synthetic construct
  misc_feature 1..19: note = Description of Artificial Sequence: Synthetic oligonucleotide
  source 1..19: mol_type = other RNA
ggcgcaggggagcagtacc

SEQ ID NO: 1943 - RNA, 19 nt, synthetic construct
  misc_feature 1..19: note = Description of Artificial Sequence: Synthetic oligonucleotide
  source 1..19: mol_type = other RNA
gcgcaggggagcagtaccg

SEQ ID NO: 1944 - RNA, 19 nt, synthetic construct
  misc_feature 1..19: note = Description of Artificial Sequence: Synthetic oligonucleotide
  source 1..19: mol_type = other RNA
cgcaggggagcagtaccgc

SEQ ID NO: 1945 - RNA, 19 nt, synthetic construct
  misc_feature 1..19: note = Description of Artificial Sequence: Synthetic oligonucleotide
  source 1..19: mol_type = other RNA
gcaggggagcagtaccgcg

SEQ ID NO: 1946 - RNA, 19 nt, synthetic construct
  misc_feature 1..19: note = Description of Artificial Sequence: Synthetic oligonucleotide
  source 1..19: mol_type = other RNA
caggggagcagtaccgcgg

SEQ ID NO: 1947 - RNA, 19 nt, synthetic construct
  misc_feature 1..19: note = Description of Artificial Sequence: Synthetic oligonucleotide
  source 1..19: mol_type = other RNA
aggggagcagtaccgcggc

SEQ ID NO: 1948 - RNA, 19 nt, synthetic construct
  misc_feature 1..19: note = Description of Artificial Sequence: Synthetic oligonucleotide
  source 1..19: mol_type = other RNA
ggggagcagtaccgcggca

SEQ ID NO: 1949 - RNA, 19 nt, synthetic construct
  misc_feature 1..19: note = Description of Artificial Sequence: Synthetic oligonucleotide
  source 1..19: mol_type = other RNA
gggagcagtaccgcggcac

SEQ ID NO: 1950 - RNA, 19 nt, synthetic construct
  misc_feature 1..19: note = Description of Artificial Sequence: Synthetic oligonucleotide
  source 1..19: mol_type = other RNA
ggagcagtaccgcggcacg

SEQ ID NO: 1951 - RNA, 19 nt, synthetic construct
  misc_feature 1..19: note = Description of Artificial Sequence: Synthetic oligonucleotide
  source 1..19: mol_type = other RNA
gagcagtaccgcggcacgg

SEQ ID NO: 1952 - RNA, 19 nt, synthetic construct
  misc_feature 1..19: note = Description of Artificial Sequence: Synthetic oligonucleotide
  source 1..19: mol_type = other RNA
agcagtaccgcggcacggt

SEQ ID NO: 1953 - RNA, 19 nt, synthetic construct
  misc_feature 1..19: note = Description of Artificial Sequence: Synthetic oligonucleotide
  source 1..19: mol_type = other RNA
gcagtaccgcggcacggtc

SEQ ID NO: 1954 - RNA, 19 nt, synthetic construct
  misc_feature 1..19: note = Description of Artificial Sequence: Synthetic oligonucleotide
  source 1..19: mol_type = other RNA
cagtaccgcggcacggtca

SEQ ID NO: 1955 - RNA, 19 nt, synthetic construct
  misc_feature 1..19: note = Description of Artificial Sequence: Synthetic oligonucleotide
  source 1..19: mol_type = other RNA
agtaccgcggcacggtcag

SEQ ID NO: 1956 - RNA, 19 nt, synthetic construct
  misc_feature 1..19: note = Description of Artificial Sequence: Synthetic oligonucleotide
  source 1..19: mol_type = other RNA
gtaccgcggcacggtcagc

SEQ ID NO: 1957 - RNA, 19 nt, synthetic construct
  misc_feature 1..19: note = Description of Artificial Sequence: Synthetic oligonucleotide
  source 1..19: mol_type = other RNA
taccgcggcacggtcagca

SEQ ID NO: 1958 - RNA, 19 nt, synthetic construct
  misc_feature 1..19: note = Description of Artificial Sequence: Synthetic oligonucleotide
  source 1..19: mol_type = other RNA
accgcggcacggtcagcaa

SEQ ID NO: 1959 - RNA, 19 nt, synthetic construct
  misc_feature 1..19: note = Description of Artificial Sequence: Synthetic oligonucleotide
  source 1..19: mol_type = other RNA
ccgcggcacggtcagcaag

SEQ ID NO: 1960 - RNA, 19 nt, synthetic construct
  misc_feature 1..19: note = Description of Artificial Sequence: Synthetic oligonucleotide
  source 1..19: mol_type = other RNA
cgcggcacggtcagcaaga

SEQ ID NO: 1961 - RNA, 19 nt, synthetic construct
  misc_feature 1..19: note = Description of Artificial Sequence: Synthetic oligonucleotide
  source 1..19: mol_type = other RNA
gcggcacggtcagcaagac

SEQ ID NO: 1962 - RNA, 19 nt, synthetic construct
  misc_feature 1..19: note = Description of Artificial Sequence: Synthetic oligonucleotide
  source 1..19: mol_type = other RNA
cggcacggtcagcaagacc

SEQ ID NO: 1963 - RNA, 19 nt, synthetic construct
  misc_feature 1..19: note = Description of Artificial Sequence: Synthetic oligonucleotide
  source 1..19: mol_type = other RNA
ggcacggtcagcaagaccc

SEQ ID NO: 1964 - RNA, 19 nt, synthetic construct
  misc_feature 1..19: note = Description of Artificial Sequence: Synthetic oligonucleotide
  source 1..19: mol_type = other RNA
gcacggtcagcaagacccg

SEQ ID NO: 1965 - RNA, 19 nt, synthetic construct
  misc_feature 1..19: note = Description of Artificial Sequence: Synthetic oligonucleotide
  source 1..19: mol_type = other RNA
cacggtcagcaagacccgc

SEQ ID NO: 1966 - RNA, 19 nt, synthetic construct
  misc_feature 1..19: note = Description of Artificial Sequence: Synthetic oligonucleotide
  source 1..19: mol_type = other RNA
acggtcagcaagacccgca

SEQ ID NO: 1967 - RNA, 19 nt, synthetic construct
  misc_feature 1..19: note = Description of Artificial Sequence: Synthetic oligonucleotide
  source 1..19: mol_type = other RNA
cggtcagcaagacccgcaa

SEQ ID NO: 1968 - RNA, 19 nt, synthetic construct
  misc_feature 1..19: note = Description of Artificial Sequence: Synthetic oligonucleotide
  source 1..19: mol_type = other RNA
ggtcagcaagacccgcaag

SEQ ID NO: 1969 - RNA, 19 nt, synthetic construct
  misc_feature 1..19: note = Description of Artificial Sequence: Synthetic oligonucleotide
  source 1..19: mol_type = other RNA
gtcagcaagacccgcaagg

SEQ ID NO: 1970 - RNA, 19 nt, synthetic construct
  misc_feature 1..19: note = Description of Artificial Sequence: Synthetic oligonucleotide
  source 1..19: mol_type = other RNA
tcagcaagacccgcaaggg

SEQ ID NO: 1971 - RNA, 19 nt, synthetic construct
  misc_feature 1..19: note = Description of Artificial Sequence: Synthetic oligonucleotide
  source 1..19: mol_type = other RNA
cagcaagacccgcaagggt

SEQ ID NO: 1972 - RNA, 19 nt, synthetic construct
  misc_feature 1..19: note = Description of Artificial Sequence: Synthetic oligonucleotide
  source 1..19: mol_type = other RNA
agcaagacccgcaagggtg

SEQ ID NO: 1973 - RNA, 19 nt, synthetic construct
  misc_feature 1..19: note = Description of Artificial Sequence: Synthetic oligonucleotide
  source 1..19: mol_type = other RNA
gcaagacccgcaagggtgt

SEQ ID NO: 1974 - RNA, 19 nt, synthetic construct
  misc_feature 1..19: note = Description of Artificial Sequence: Synthetic oligonucleotide
  source 1..19: mol_type = other RNA
caagacccgcaagggtgtc

SEQ ID NO: 1975 - RNA, 19 nt, synthetic construct
  misc_feature 1..19: note = Description of Artificial Sequence: Synthetic oligonucleotide
  source 1..19: mol_type = other RNA
aagacccgcaagggtgtcc

SEQ ID NO: 1976 - RNA, 19 nt, synthetic construct
  misc_feature 1..19: note = Description of Artificial Sequence: Synthetic oligonucleotide
  source 1..19: mol_type = other RNA
agacccgcaagggtgtcca

SEQ ID NO: 1977 - RNA, 19 nt, synthetic construct
  misc_feature 1..19: note = Description of Artificial Sequence: Synthetic oligonucleotide
  source 1..19: mol_type = other RNA
gacccgcaagggtgtccag

SEQ ID NO: 1978 - RNA, 19 nt, synthetic construct
  misc_feature 1..19: note = Description of Artificial Sequence: Synthetic oligonucleotide
  source 1..19: mol_type = other RNA
acccgcaagggtgtccagt

SEQ ID NO: 1979 - RNA, 19 nt, synthetic construct
  misc_feature 1..19: note = Description of Artificial Sequence: Synthetic oligonucleotide
  source 1..19: mol_type = other RNA
cccgcaagggtgtccagtg

SEQ ID NO: 1980 - RNA, 19 nt, synthetic construct
  misc_feature 1..19: note = Description of Artificial Sequence: Synthetic oligonucleotide
  source 1..19: mol_type = other RNA
ccgcaagggtgtccagtgc

SEQ ID NO: 1981 - RNA, 19 nt, synthetic construct
  misc_feature 1..19: note = Description of Artificial Sequence: Synthetic oligonucleotide
  source 1..19: mol_type = other RNA
cgcaagggtgtccagtgcc

SEQ ID NO: 1982 - RNA, 19 nt, synthetic construct
  misc_feature 1..19: note = Description of Artificial Sequence: Synthetic oligonucleotide
  source 1..19: mol_type = other RNA
gcaagggtgtccagtgcca

SEQ ID NO: 1983 - RNA, 19 nt, synthetic construct
  misc_feature 1..19: note = Description of Artificial Sequence: Synthetic oligonucleotide
  source 1..19: mol_type = other RNA
caagggtgtccagtgccag

SEQ ID NO: 1984 - RNA, 19 nt, synthetic construct
  misc_feature 1..19: note = Description of Artificial Sequence: Synthetic oligonucleotide
  source 1..19: mol_type = other RNA
aagggtgtccagtgccagc

SEQ ID NO: 1985 - RNA, 19 nt, synthetic construct
  misc_feature 1..19: note = Description of Artificial Sequence: Synthetic oligonucleotide
  source 1..19: mol_type = other RNA
agggtgtccagtgccagcg

SEQ ID NO: 1986 - RNA, 19 nt, synthetic construct
  misc_feature 1..19: note = Description of Artificial Sequence: Synthetic oligonucleotide
  source 1..19: mol_type = other RNA
gggtgtccagtgccagcgc

SEQ ID NO: 1987 - RNA, 19 nt, synthetic construct
  misc_feature 1..19: note = Description of Artificial Sequence: Synthetic oligonucleotide
  source 1..19: mol_type = other RNA
ggtgtccagtgccagcgct

SEQ ID NO: 1988 - RNA, 19 nt, synthetic construct
  misc_feature 1..19: note = Description of Artificial Sequence: Synthetic oligonucleotide
  source 1..19: mol_type = other RNA
gtgtccagtgccagcgctg

SEQ ID NO: 1989 - RNA, 19 nt, synthetic construct
  misc_feature 1..19: note = Description of Artificial Sequence: Synthetic oligonucleotide
  source 1..19: mol_type = other RNA
tgtccagtgccagcgctgg

SEQ ID NO: 1990 - RNA, 19 nt, synthetic construct
  misc_feature 1..19: note = Description of Artificial Sequence: Synthetic oligonucleotide
  source 1..19: mol_type = other RNA
gtccagtgccagcgctggt

SEQ ID NO: 1991 - RNA, 19 nt, synthetic construct
  misc_feature 1..19: note = Description of Artificial Sequence: Synthetic oligonucleotide
  source 1..19: mol_type = other RNA
tccagtgccagcgctggtc

SEQ ID NO: 1992 - RNA, 19 nt, synthetic construct
  misc_feature 1..19: note = Description of Artificial Sequence: Synthetic oligonucleotide
  source 1..19: mol_type = other RNA
ccagtgccagcgctggtcc

SEQ ID NO: 1993 - RNA, 19 nt, synthetic construct
  misc_feature 1..19: note = Description of Artificial Sequence: Synthetic oligonucleotide
  source 1..19: mol_type = other RNA
cagtgccagcgctggtccg

SEQ ID NO: 1994 - RNA, 19 nt, synthetic construct
  misc_feature 1..19: note = Description of Artificial Sequence: Synthetic oligonucleotide
  source 1..19: mol_type = other RNA
agtgccagcgctggtccgc

SEQ ID NO: 1995 - RNA, 19 nt, synthetic construct
  misc_feature 1..19: note = Description of Artificial Sequence: Synthetic oligonucleotide
  source 1..19: mol_type = other RNA
gtgccagcgctggtccgct

SEQ ID NO: 1996 - RNA, 19 nt, synthetic construct
  misc_feature 1..19: note = Description of Artificial Sequence: Synthetic oligonucleotide
  source 1..19: mol_type = other RNA
tgccagcgctggtccgctg

SEQ ID NO: 1997 - RNA, 19 nt, synthetic construct
  misc_feature 1..19: note = Description of Artificial Sequence: Synthetic oligonucleotide
  source 1..19: mol_type = other RNA
gccagcgctggtccgctga

SEQ ID NO: 1998 - RNA, 19 nt, synthetic construct
  misc_feature 1..19: note = Description of Artificial Sequence: Synthetic oligonucleotide
  source 1..19: mol_type = other RNA
ccagcgctggtccgctgag

SEQ ID NO: 1999 - RNA, 19 nt, synthetic construct
  misc_feature 1..19: note = Description of Artificial Sequence: Synthetic oligonucleotide
  source 1..19: mol_type = other RNA
cagcgctggtccgctgaga

SEQ ID NO: 2000 - RNA, 19 nt, synthetic construct
  misc_feature 1..19: note = Description of Artificial Sequence: Synthetic oligonucleotide
  source 1..19: mol_type = other RNA
agcgctggtccgctgagac

SEQ ID NO: 2001 - RNA, 19 nt, synthetic construct
  misc_feature 1..19: note = Description of Artificial Sequence: Synthetic oligonucleotide
  source 1..19: mol_type = other RNA
gcgctggtccgctgagacg

SEQ ID NO: 2002 - RNA, 19 nt, synthetic construct
  misc_feature 1..19: note = Description of Artificial Sequence: Synthetic oligonucleotide
  source 1..19: mol_type = other RNA
cgctggtccgctgagacgc

SEQ ID NO: 2003 - RNA, 19 nt, synthetic construct
  misc_feature 1..19: note = Description of Artificial Sequence: Synthetic oligonucleotide
  source 1..19: mol_type = other RNA
gctggtccgctgagacgcc

SEQ ID NO: 2004 - RNA, 19 nt, synthetic construct
  misc_feature 1..19: note = Description of Artificial Sequence: Synthetic oligonucleotide
  source 1..19: mol_type = other RNA
ctggtccgctgagacgccg

SEQ ID NO: 2005 - RNA, 19 nt, synthetic construct
  misc_feature 1..19: note = Description of Artificial Sequence: Synthetic oligonucleotide
  source 1..19: mol_type = other RNA
tggtccgctgagacgccgc

SEQ ID NO: 2006 - RNA, 19 nt, synthetic construct
  misc_feature 1..19: note = Description of Artificial Sequence: Synthetic oligonucleotide
  source 1..19: mol_type = other RNA
ggtccgctgagacgccgca

SEQ ID NO: 2007 - RNA, 19 nt, synthetic construct
  misc_feature 1..19: note = Description of Artificial Sequence: Synthetic oligonucleotide
  source 1..19: mol_type = other RNA
gtccgctgagacgccgcac

SEQ ID NO: 2008 - RNA, 19 nt, synthetic construct
  misc_feature 1..19: note = Description of Artificial Sequence: Synthetic oligonucleotide
  source 1..19: mol_type = other RNA
tccgctgagacgccgcaca

SEQ ID NO: 2009 - RNA, 19 nt, synthetic construct
  misc_feature 1..19: note = Description of Artificial Sequence: Synthetic oligonucleotide
  source 1..19: mol_type = other RNA
ccgctgagacgccgcacaa

SEQ ID NO: 2010 - RNA, 19 nt, synthetic construct
  misc_feature 1..19: note = Description of Artificial Sequence: Synthetic oligonucleotide
  source 1..19: mol_type = other RNA
cgctgagacgccgcacaag

SEQ ID NO: 2011 - RNA, 19 nt, synthetic construct
  misc_feature 1..19: note = Description of Artificial Sequence: Synthetic oligonucleotide
  source 1..19: mol_type = other RNA
gctgagacgccgcacaagc

SEQ ID NO: 2012 - RNA, 19 nt, synthetic construct
  misc_feature 1..19: note = Description of Artificial Sequence: Synthetic oligonucleotide
  source 1..19: mol_type = other RNA
ctgagacgccgcacaagcc

SEQ ID NO: 2013 - RNA, 19 nt, synthetic construct
  misc_feature 1..19: note = Description of Artificial Sequence: Synthetic oligonucleotide
  source 1..19: mol_type = other RNA
tgagacgccgcacaagccg

SEQ ID NO: 2014 - RNA, 19 nt, synthetic construct
  misc_feature 1..19: note = Description of Artificial Sequence: Synthetic oligonucleotide
  source 1..19: mol_type = other RNA
gagacgccgcacaagccgc

SEQ ID NO: 2015 - RNA, 19 nt, synthetic construct
  misc_feature 1..19: note = Description of Artificial Sequence: Synthetic oligonucleotide
  source 1..19: mol_type = other RNA
agacgccgcacaagccgca

SEQ ID NO: 2016 - RNA, 19 nt, synthetic construct
  misc_feature 1..19: note = Description of Artificial Sequence: Synthetic oligonucleotide
  source 1..19: mol_type = other RNA
gacgccgcacaagccgcag

SEQ ID NO: 2017 - RNA, 19 nt, synthetic construct
  misc_feature 1..19: note = Description of Artificial Sequence: Synthetic oligonucleotide
  source 1..19: mol_type = other RNA
acgccgcacaagccgcagt

SEQ ID NO: 2018 - RNA, 19 nt, synthetic construct
  misc_feature 1..19: note = Description of Artificial Sequence: Synthetic oligonucleotide
  source 1..19: mol_type = other RNA
cgccgcacaagccgcagtt

SEQ ID NO: 2019 - RNA, 19 nt, synthetic construct
  misc_feature 1..19: note = Description of Artificial Sequence: Synthetic oligonucleotide
  source 1..19: mol_type = other RNA
gccgcacaagccgcagttc

SEQ ID NO: 2020 - RNA, 19 nt, synthetic construct
  misc_feature 1..19: note = Description of Artificial Sequence: Synthetic oligonucleotide
  source 1..19: mol_type = other RNA
ccgcacaagccgcagttca

SEQ ID NO: 2021 - RNA, 19 nt, synthetic construct
  misc_feature 1..19: note = Description of Artificial Sequence: Synthetic oligonucleotide
  source 1..19: mol_type = other RNA
cgcacaagccgcagttcac

SEQ ID NO: 2022 - RNA, 19 nt, synthetic construct
  misc_feature 1..19: note = Description of Artificial Sequence: Synthetic oligonucleotide
  source 1..19: mol_type = other RNA
gcacaagccgcagttcacg

SEQ ID NO: 2023 - RNA, 19 nt, synthetic construct
  misc_feature 1..19: note = Description of Artificial Sequence: Synthetic oligonucleotide
  source 1..19: mol_type = other RNA
cacaagccgcagttcacgt

SEQ ID NO: 2024 - RNA, 19 nt, synthetic construct
  misc_feature 1..19: note = Description of Artificial Sequence: Synthetic oligonucleotide
  source 1..19: mol_type = other RNA
acaagccgcagttcacgtt

SEQ ID NO: 2025 - RNA, 19 nt, synthetic construct
  misc_feature 1..19: note = Description of Artificial Sequence: Synthetic oligonucleotide
  source 1..19: mol_type = other RNA
caagccgcagttcacgttt

SEQ ID NO: 2026 - RNA, 19 nt, synthetic construct
  misc_feature 1..19: note = Description of Artificial Sequence: Synthetic oligonucleotide
  source 1..19: mol_type = other RNA
aagccgcagttcacgttta

SEQ ID NO: 2027 - RNA, 19 nt, synthetic construct
  misc_feature 1..19: note = Description of Artificial Sequence: Synthetic oligonucleotide
  source 1..19: mol_type = other RNA
agccgcagttcacgtttac

SEQ ID NO: 2028 - RNA, 19 nt, synthetic construct
  misc_feature 1..19: note = Description of Artificial Sequence: Synthetic oligonucleotide
  source 1..19: mol_type = other RNA
gccgcagttcacgtttacc

SEQ ID NO: 2029 - RNA, 19 nt, synthetic construct
  misc_feature 1..19: note = Description of Artificial Sequence: Synthetic oligonucleotide
  source 1..19: mol_type = other RNA
ccgcagttcacgtttacct

SEQ ID NO: 2030 - RNA, 19 nt, synthetic construct
  misc_feature 1..19: note = Description of Artificial Sequence: Synthetic oligonucleotide
  source 1..19: mol_type = other RNA
cgcagttcacgtttacctc

SEQ ID NO: 2031 - RNA, 19 nt, synthetic construct
  misc_feature 1..19: note = Description of Artificial Sequence: Synthetic oligonucleotide
  source 1..19: mol_type = other RNA
gcagttcacgtttacctcc

SEQ ID NO: 2032 - RNA, 19 nt, synthetic construct
  misc_feature 1..19: note = Description of Artificial Sequence: Synthetic oligonucleotide
  source 1..19: mol_type = other RNA
cagttcacgtttacctccg

SEQ ID NO: 2033 - RNA, 19 nt, synthetic construct
  misc_feature 1..19: note = Description of Artificial Sequence: Synthetic oligonucleotide
  source 1..19: mol_type = other RNA
agttcacgtttacctccga

SEQ ID NO: 2034 - RNA, 19 nt, synthetic construct
  misc_feature 1..19: note = Description of Artificial Sequence: Synthetic oligonucleotide
  source 1..19: mol_type = other RNA
gttcacgtttacctccgaa

SEQ ID NO: 2035 - RNA, 19 nt, synthetic construct
  misc_feature 1..19: note = Description of Artificial Sequence: Synthetic oligonucleotide
  source 1..19: mol_type = other RNA
ttcacgtttacctccgaac

SEQ ID NO: 2036 - RNA, 19 nt, synthetic construct
  misc_feature 1..19: note = Description of Artificial Sequence: Synthetic oligonucleotide
  source 1..19: mol_type = other RNA
tcacgtttacctccgaacc

SEQ ID NO: 2037 - RNA, 19 nt, synthetic construct
  misc_feature 1..19: note = Description of Artificial Sequence: Synthetic oligonucleotide
  source 1..19: mol_type = other RNA
cacgtttacctccgaaccg

SEQ ID NO: 2038 - RNA, 19 nt, synthetic construct
  misc_feature 1..19: note = Description of Artificial Sequence: Synthetic oligonucleotide
  source 1..19: mol_type = other RNA
acgtttacctccgaaccgc

SEQ ID NO: 2039 - RNA, 19 nt, synthetic construct
  misc_feature 1..19: note = Description of Artificial Sequence: Synthetic oligonucleotide
  source 1..19: mol_type = other RNA
cgtttacctccgaaccgca

SEQ ID NO: 2040 - RNA, 19 nt, synthetic construct
  misc_feature 1..19: note = Description of Artificial Sequence: Synthetic oligonucleotide
  source 1..19: mol_type = other RNA
gtttacctccgaaccgcat

SEQ ID NO: 2041 - RNA, 19 nt, synthetic construct
  misc_feature 1..19: note = Description of Artificial Sequence: Synthetic oligonucleotide
  source 1..19: mol_type = other RNA
tttacctccgaaccgcatg

SEQ ID NO: 2042 - RNA, 19 nt, synthetic construct
  misc_feature 1..19: note = Description of Artificial Sequence: Synthetic oligonucleotide
  source 1..19: mol_type = other RNA
ttacctccgaaccgcatgc

SEQ ID NO: 2043 - RNA, 19 nt, synthetic construct
  misc_feature 1..19: note = Description of Artificial Sequence: Synthetic oligonucleotide
  source 1..19: mol_type = other RNA
tacctccgaaccgcatgca

SEQ ID NO: 2044 - RNA, 19 nt, synthetic construct
  misc_feature 1..19: note = Description of Artificial Sequence: Synthetic oligonucleotide
  source 1..19: mol_type = other RNA
acctccgaaccgcatgcac

SEQ ID NO: 2045 - RNA, 19 nt, synthetic construct
  misc_feature 1..19: note = Description of Artificial Sequence: Synthetic oligonucleotide
  source 1..19: mol_type = other RNA
cctccgaaccgcatgcaca

SEQ ID NO: 2046 - RNA, 19 nt, synthetic construct
  misc_feature 1..19: note = Description of Artificial Sequence: Synthetic oligonucleotide
  source 1..19: mol_type = other RNA
ctccgaaccgcatgcacaa

SEQ ID NO: 2047 - RNA, 19 nt, synthetic construct
  misc_feature 1..19: note = Description of Artificial Sequence: Synthetic oligonucleotide
  source 1..19: mol_type = other RNA
tccgaaccgcatgcacaac

SEQ ID NO: 2048 - RNA, 19 nt, synthetic construct
  misc_feature 1..19: note = Description of Artificial Sequence: Synthetic oligonucleotide
  source 1..19: mol_type = other RNA
ccgaaccgcatgcacaact

SEQ ID NO: 2049 - RNA, 19 nt, synthetic construct
  misc_feature 1..19: note = Description of Artificial Sequence: Synthetic oligonucleotide
  source 1..19: mol_type = other RNA
cgaaccgcatgcacaactg

SEQ ID NO: 2050 - RNA, 19 nt, synthetic construct
  misc_feature 1..19: note = Description of Artificial Sequence: Synthetic oligonucleotide
  source 1..19: mol_type = other RNA
gaaccgcatgcacaactgg

SEQ ID NO: 2051 - RNA, 19 nt, synthetic construct
  misc_feature 1..19: note = Description of Artificial Sequence: Synthetic oligonucleotide
  source 1..19: mol_type = other RNA
aaccgcatgcacaactgga

SEQ ID NO: 2052 - RNA, 19 nt, synthetic construct
  misc_feature 1..19: note = Description of Artificial Sequence: Synthetic oligonucleotide
  source 1..19: mol_type = other RNA
accgcatgcacaactggag

SEQ ID NO: 2053 - RNA, 19 nt, synthetic construct
  misc_feature 1..19: note = Description of Artificial Sequence: Synthetic oligonucleotide
  source 1..19: mol_type = other RNA
ccgcatgcacaactggagg

SEQ ID NO: 2054 - RNA, 19 nt, synthetic construct
  misc_feature 1..19: note = Description of Artificial Sequence: Synthetic oligonucleotide
  source 1..19: mol_type = other RNA
cgcatgcacaactggagga

SEQ ID NO: 2055 - RNA, 19 nt, synthetic construct
  misc_feature 1..19: note = Description of Artificial Sequence: Synthetic oligonucleotide
  source 1..19: mol_type = other RNA
gcatgcacaactggaggag

SEQ ID NO: 2056 - RNA, 19 nt, synthetic construct
  misc_feature 1..19: note = Description of Artificial Sequence: Synthetic oligonucleotide
  source 1..19: mol_type = other RNA
catgcacaactggaggaga

SEQ ID NO: 2057 - RNA, 19 nt, synthetic construct
  misc_feature 1..19: note = Description of Artificial Sequence: Synthetic oligonucleotide
  source 1..19: mol_type = other RNA
atgcacaactggaggagaa

SEQ ID NO: 2058 - RNA, 19 nt, synthetic construct
  misc_feature 1..19: note = Description of Artificial Sequence: Synthetic oligonucleotide
  source 1..19: mol_type = other RNA
tgcacaactggaggagaac

SEQ ID NO: 2059 - RNA, 19 nt, synthetic construct
  misc_feature 1..19: note = Description of Artificial Sequence: Synthetic oligonucleotide
  source 1..19: mol_type = other RNA
gcacaactggaggagaact

SEQ ID NO: 2060 - RNA, 19 nt, synthetic construct
  misc_feature 1..19: note = Description of Artificial Sequence: Synthetic oligonucleotide
  source 1..19: mol_type = other RNA
cacaactggaggagaactt

SEQ ID NO: 2061 - RNA, 19 nt, synthetic construct
  misc_feature 1..19: note = Description of Artificial Sequence: Synthetic oligonucleotide
  source 1..19: mol_type = other RNA
acaactggaggagaacttc

SEQ ID NO: 2062 - RNA, 19 nt, synthetic construct
  misc_feature 1..19: note = Description of Artificial Sequence: Synthetic oligonucleotide
  source 1..19: mol_type = other RNA
caactggaggagaacttct

SEQ ID NO: 2063 - RNA, 19 nt, synthetic construct
  misc_feature 1..19: note = Description of Artificial Sequence: Synthetic oligonucleotide
  source 1..19: mol_type = other RNA
aactggaggagaacttctg

SEQ ID NO: 2064 - RNA, 19 nt, synthetic construct
  misc_feature 1..19: note = Description of Artificial Sequence: Synthetic oligonucleotide
  source 1..19: mol_type = other RNA
actggaggagaacttctgc

SEQ ID NO: 2065 - RNA, 19 nt, synthetic construct
  misc_feature 1..19: note = Description of Artificial Sequence: Synthetic oligonucleotide
  source 1..19: mol_type = other RNA
ctggaggagaacttctgcc

SEQ ID NO: 2066 - RNA, 19 nt, synthetic construct
  misc_feature 1..19: note = Description of Artificial Sequence: Synthetic oligonucleotide
  source 1..19: mol_type = other RNA
tggaggagaacttctgccg

SEQ ID NO: 2067 - RNA, 19 nt, synthetic construct
  misc_feature 1..19: note = Description of Artificial Sequence: Synthetic oligonucleotide
  source 1..19: mol_type = other RNA
ggaggagaacttctgccgg

SEQ ID NO: 2068 - RNA, 19 nt, synthetic construct
  misc_feature 1..19: note = Description of Artificial Sequence: Synthetic oligonucleotide
  source 1..19: mol_type = other RNA
gaggagaacttctgccgga

SEQ ID NO: 2069 - RNA, 19 nt, synthetic construct
  misc_feature 1..19: note = Description of Artificial Sequence: Synthetic oligonucleotide
  source 1..19: mol_type = other RNA
aggagaacttctgccggaa

SEQ ID NO: 2070 - RNA, 19 nt, synthetic construct
  misc_feature 1..19: note = Description of Artificial Sequence: Synthetic oligonucleotide
  source 1..19: mol_type = other RNA
ggagaacttctgccggaac

SEQ ID NO: 2071 - RNA, 19 nt, synthetic construct
  misc_feature 1..19: note = Description of Artificial Sequence: Synthetic oligonucleotide
  source 1..19: mol_type = other RNA
gagaacttctgccggaacc

SEQ ID NO: 2072 - RNA, 19 nt, synthetic construct
  misc_feature 1..19: note = Description of Artificial Sequence: Synthetic oligonucleotide
  source 1..19: mol_type = other RNA
agaacttctgccggaaccc

SEQ ID NO: 2073 - RNA, 19 nt, synthetic construct
  misc_feature 1..19: note = Description of Artificial Sequence: Synthetic oligonucleotide
  source 1..19: mol_type = other RNA
gaacttctgccggaaccca

SEQ ID NO: 2074 - RNA, 19 nt, synthetic construct
  misc_feature 1..19: note = Description of Artificial Sequence: Synthetic oligonucleotide
  source 1..19: mol_type = other RNA
aacttctgccggaacccag

SEQ ID NO: 2075 - RNA, 19 nt, synthetic construct
  misc_feature 1..19: note = Description of Artificial Sequence: Synthetic oligonucleotide
  source 1..19: mol_type = other RNA
acttctgccggaacccaga

SEQ ID NO: 2076 - RNA, 19 nt, synthetic construct
  misc_feature 1..19: note = Description of Artificial Sequence: Synthetic oligonucleotide
  source 1..19: mol_type = other RNA
cttctgccggaacccagat

SEQ ID NO: 2077 - RNA, 19 nt, synthetic construct
  misc_feature 1..19: note = Description of Artificial Sequence: Synthetic oligonucleotide
  source 1..19: mol_type = other RNA
ttctgccggaacccagatg

SEQ ID NO: 2078 - RNA, 19 nt, synthetic construct
  misc_feature 1..19: note = Description of Artificial Sequence: Synthetic oligonucleotide
  source 1..19: mol_type = other RNA
tctgccggaacccagatgg

SEQ ID NO: 2079 - RNA, 19 nt, synthetic construct
  misc_feature 1..19: note = Description of Artificial Sequence: Synthetic oligonucleotide
  source 1..19: mol_type = other RNA
ctgccggaacccagatggg

SEQ ID NO: 2080 - RNA, 19 nt, synthetic construct
  misc_feature 1..19: note = Description of Artificial Sequence: Synthetic oligonucleotide
  source 1..19: mol_type = other RNA
tgccggaacccagatgggg

SEQ ID NO: 2081 - RNA, 19 nt, synthetic construct
  misc_feature 1..19: note = Description of Artificial Sequence: Synthetic oligonucleotide
  source 1..19: mol_type = other RNA
gccggaacccagatgggga

SEQ ID NO: 2082 - RNA, 19 nt, synthetic construct
  misc_feature 1..19: note = Description of Artificial Sequence: Synthetic oligonucleotide
  source 1..19: mol_type = other RNA
ccggaacccagatggggat

SEQ ID NO: 2083 - RNA, 19 nt, synthetic construct
  misc_feature 1..19: note = Description of Artificial Sequence: Synthetic oligonucleotide
  source 1..19: mol_type = other RNA
cggaacccagatggggata

SEQ ID NO: 2084 - RNA, 19 nt, synthetic construct
  misc_feature 1..19: note = Description of Artificial Sequence: Synthetic oligonucleotide
  source 1..19: mol_type = other RNA
ggaacccagatggggatag

SEQ ID NO: 2085 - RNA, 19 nt, synthetic construct
  misc_feature 1..19: note = Description of Artificial Sequence: Synthetic oligonucleotide
  source 1..19: mol_type = other RNA
gaacccagatggggatagc

SEQ ID NO: 2086 - RNA, 19 nt, synthetic construct
  misc_feature 1..19: note = Description of Artificial Sequence: Synthetic oligonucleotide
  source 1..19: mol_type = other RNA
aacccagatggggatagcc

SEQ ID NO: 2087 - RNA, 19 nt, synthetic construct
  misc_feature 1..19: note = Description of Artificial Sequence: Synthetic oligonucleotide
  source 1..19: mol_type = other RNA
acccagatggggatagcca

SEQ ID NO: 2088 - RNA, 19 nt, synthetic construct
  misc_feature 1..19: note = Description of Artificial Sequence: Synthetic oligonucleotide
  source 1..19: mol_type = other RNA
cccagatggggatagccat

SEQ ID NO: 2089 - RNA, 19 nt, synthetic construct
  misc_feature 1..19: note = Description of Artificial Sequence: Synthetic oligonucleotide
  source 1..19: mol_type = other RNA
ccagatggggatagccatg

SEQ ID NO: 2090 - RNA, 19 nt, synthetic construct
  misc_feature 1..19: note = Description of Artificial Sequence: Synthetic oligonucleotide
  source 1..19: mol_type = other RNA
cagatggggatagccatgg

SEQ ID NO: 2091 - RNA, 19 nt, synthetic construct
  misc_feature 1..19: note = Description of Artificial Sequence: Synthetic oligonucleotide
  source 1..19: mol_type = other RNA
agatggggatagccatggg

SEQ ID NO: 2092 - RNA, 19 nt, synthetic construct
  misc_feature 1..19: note = Description of Artificial Sequence: Synthetic oligonucleotide
  source 1..19: mol_type = other RNA
gatggggatagccatgggc

SEQ ID NO: 2093 - RNA, 19 nt, synthetic construct
  misc_feature 1..19: note = Description of Artificial Sequence: Synthetic oligonucleotide
  source 1..19: mol_type = other RNA
atggggatagccatgggcc

SEQ ID NO: 2094 - RNA, 19 nt, synthetic construct
  misc_feature 1..19: note = Description of Artificial Sequence: Synthetic oligonucleotide
  source 1..19: mol_type = other RNA
tggggatagccatgggccc

SEQ ID NO: 2095 - RNA, 19 nt, synthetic construct
  misc_feature 1..19: note = Description of Artificial Sequence: Synthetic oligonucleotide
  source 1..19: mol_type = other RNA
ggggatagccatgggccct

SEQ ID NO: 2096 - RNA, 19 nt, synthetic construct
  misc_feature 1..19: note = Description of Artificial Sequence: Synthetic oligonucleotide
  source 1..19: mol_type = other RNA
gggatagccatgggccctg

SEQ ID NO: 2097 - RNA, 19 nt, synthetic construct
  misc_feature 1..19: note = Description of Artificial Sequence: Synthetic oligonucleotide
  source 1..19: mol_type = other RNA
ggatagccatgggccctgg

SEQ ID NO: 2098 - RNA, 19 nt, synthetic construct
  misc_feature 1..19: note = Description of Artificial Sequence: Synthetic oligonucleotide
  source 1..19: mol_type = other RNA
gatagccatgggccctggt

SEQ ID NO: 2099 - RNA, 19 nt, synthetic construct
  misc_feature 1..19: note = Description of Artificial Sequence: Synthetic oligonucleotide
  source 1..19: mol_type = other RNA
atagccatgggccctggtg

SEQ ID NO: 2100 - RNA, 19 nt, synthetic construct
  misc_feature 1..19: note = Description of Artificial Sequence: Synthetic oligonucleotide
  source 1..19: mol_type = other RNA
tagccatgggccctggtgc

SEQ ID NO: 2101 - RNA, 19 nt, synthetic construct
  misc_feature 1..19: note = Description of Artificial Sequence: Synthetic oligonucleotide
  source 1..19: mol_type = other RNA
agccatgggccctggtgct

SEQ ID NO: 2102 - RNA, 19 nt, synthetic construct
  misc_feature 1..19: note = Description of Artificial Sequence: Synthetic oligonucleotide
  source 1..19: mol_type = other RNA
gccatgggccctggtgcta

SEQ ID NO: 2103 - RNA, 19 nt, synthetic construct
  misc_feature 1..19: note = Description of Artificial Sequence: Synthetic oligonucleotide
  source 1..19: mol_type = other RNA
ccatgggccctggtgctac

SEQ ID NO: 2104 - RNA, 19 nt, synthetic construct
  misc_feature 1..19: note = Description of Artificial Sequence: Synthetic oligonucleotide
  source 1..19: mol_type = other RNA
catgggccctggtgctaca

SEQ ID NO: 2105 - RNA, 19 nt, synthetic construct
  misc_feature 1..19: note = Description of Artificial Sequence: Synthetic oligonucleotide
  source 1..19: mol_type = other RNA
atgggccctggtgctacac

SEQ ID NO: 2106 - RNA, 19 nt, synthetic construct
  misc_feature 1..19: note = Description of Artificial Sequence: Synthetic oligonucleotide
  source 1..19: mol_type = other RNA
tgggccctggtgctacacg

SEQ ID NO: 2107 - RNA, 19 nt, synthetic construct
  misc_feature 1..19: note = Description of Artificial Sequence: Synthetic oligonucleotide
  source 1..19: mol_type = other RNA
gggccctggtgctacacga

SEQ ID NO: 2108 - RNA, 19 nt, synthetic construct
  misc_feature 1..19: note = Description of Artificial Sequence: Synthetic oligonucleotide
  source 1..19: mol_type = other RNA
ggccctggtgctacacgat

SEQ ID NO: 2109 - RNA, 19 nt, synthetic construct
  misc_feature 1..19: note = Description of Artificial Sequence: Synthetic oligonucleotide
  source 1..19: mol_type = other RNA
gccctggtgctacacgatg

SEQ ID NO: 2110 - RNA, 19 nt, synthetic construct
  misc_feature 1..19: note = Description of Artificial Sequence: Synthetic oligonucleotide
  source 1..19: mol_type = other RNA
ccctggtgctacacgatgg

SEQ ID NO: 2111 - RNA, 19 nt, synthetic construct
  misc_feature 1..19: note = Description of Artificial Sequence: Synthetic oligonucleotide
  source 1..19: mol_type = other RNA
cctggtgctacacgatgga

SEQ ID NO: 2112 - RNA, 19 nt, synthetic construct
  misc_feature 1..19: note = Description of Artificial Sequence: Synthetic oligonucleotide
  source 1..19: mol_type = other RNA
ctggtgctacacgatggac

SEQ ID NO: 2113 - RNA, 19 nt, synthetic construct
  misc_feature 1..19: note = Description of Artificial Sequence: Synthetic oligonucleotide
  source 1..19: mol_type = other RNA
tggtgctacacgatggacc

SEQ ID NO: 2114 - RNA, 19 nt, synthetic construct
  misc_feature 1..19: note = Description of Artificial Sequence: Synthetic oligonucleotide
  source 1..19: mol_type = other RNA
ggtgctacacgatggaccc

SEQ ID NO: 2115 - RNA, 19 nt, synthetic construct
  misc_feature 1..19: note = Description of Artificial Sequence: Synthetic oligonucleotide
  source 1..19: mol_type = other RNA
gtgctacacgatggaccca

SEQ ID NO: 2116 - RNA, 19 nt, synthetic construct
  misc_feature 1..19: note = Description of Artificial Sequence: Synthetic oligonucleotide
  source 1..19: mol_type = other RNA
tgctacacgatggacccaa

SEQ ID NO: 2117 - RNA, 19 nt, synthetic construct
  misc_feature 1..19: note = Description of Artificial Sequence: Synthetic oligonucleotide
  source 1..19: mol_type = other RNA
gctacacgatggacccaag

SEQ ID NO: 2118 - RNA, 19 nt, synthetic construct
  misc_feature 1..19: note = Description of Artificial Sequence: Synthetic oligonucleotide
  source 1..19: mol_type = other RNA
ctacacgatggacccaagg

SEQ ID NO: 2119 - RNA, 19 nt, synthetic construct
  misc_feature 1..19: note = Description of Artificial Sequence: Synthetic oligonucleotide
  source 1..19: mol_type = other RNA
tacacgatggacccaagga

SEQ ID NO: 2120 - RNA, 19 nt, synthetic construct
  misc_feature 1..19: note = Description of Artificial Sequence: Synthetic oligonucleotide
  source 1..19: mol_type = other RNA
acacgatggacccaaggac

SEQ ID NO: 2121 - RNA, 19 nt, synthetic construct
  misc_feature 1..19: note = Description of Artificial Sequence: Synthetic oligonucleotide
  source 1..19: mol_type = other RNA
cacgatggacccaaggacc

SEQ ID NO: 2122 - RNA, 19 nt, synthetic construct
  misc_feature 1..19: note = Description of Artificial Sequence: Synthetic oligonucleotide
  source 1..19: mol_type = other RNA
acgatggacccaaggaccc

SEQ ID NO: 2123 - RNA, 19 nt, synthetic construct
  misc_feature 1..19: note = Description of Artificial Sequence: Synthetic oligonucleotide
  source 1..19: mol_type = other RNA
cgatggacccaaggacccc

SEQ ID NO: 2124 - RNA, 19 nt, synthetic construct
  misc_feature 1..19: note = Description of Artificial Sequence: Synthetic oligonucleotide
  source 1..19: mol_type = other RNA
gatggacccaaggacccca

SEQ ID NO: 2125 - RNA, 19 nt, synthetic construct
  misc_feature 1..19: note = Description of Artificial Sequence: Synthetic oligonucleotide
  source 1..19: mol_type = other RNA
atggacccaaggaccccat

SEQ ID NO: 2126 - RNA, 19 nt, synthetic construct
  misc_feature 1..19: note = Description of Artificial Sequence: Synthetic oligonucleotide
  source 1..19: mol_type = other RNA
tggacccaaggaccccatt

SEQ ID NO: 2127 - RNA, 19 nt, synthetic construct
  misc_feature 1..19: note = Description of Artificial Sequence: Synthetic oligonucleotide
  source 1..19: mol_type = other RNA
ggacccaaggaccccattc

SEQ ID NO: 2128 - RNA, 19 nt, synthetic construct
  misc_feature 1..19: note = Description of Artificial Sequence: Synthetic oligonucleotide
  source 1..19: mol_type = other RNA
gacccaaggaccccattcg

SEQ ID NO: 2129 - RNA, 19 nt, synthetic construct
  misc_feature 1..19: note = Description of Artificial Sequence: Synthetic oligonucleotide
  source 1..19: mol_type = other RNA
acccaaggaccccattcga

SEQ ID NO: 2130 - RNA, 19 nt, synthetic construct
  misc_feature 1..19: note = Description of Artificial Sequence: Synthetic oligonucleotide
  source 1..19: mol_type = other RNA
cccaaggaccccattcgac

SEQ ID NO: 2131 - RNA, 19 nt, synthetic construct
  misc_feature 1..19: note = Description of Artificial Sequence: Synthetic oligonucleotide
  source 1..19: mol_type = other RNA
ccaaggaccccattcgact

SEQ ID NO: 2132 - RNA, 19 nt, synthetic construct
  misc_feature 1..19: note = Description of Artificial Sequence: Synthetic oligonucleotide
  source 1..19: mol_type = other RNA
caaggaccccattcgacta

SEQ ID NO: 2133 - RNA, 19 nt, synthetic construct
  misc_feature 1..19: note = Description of Artificial Sequence: Synthetic oligonucleotide
  source 1..19: mol_type = other RNA
aaggaccccattcgactac

SEQ ID NO: 2134 - RNA, 19 nt, synthetic construct
  misc_feature 1..19: note = Description of Artificial Sequence: Synthetic oligonucleotide
  source 1..19: mol_type = other RNA
aggaccccattcgactact

SEQ ID NO: 2135 - RNA, 19 nt, synthetic construct
  misc_feature 1..19: note = Description of Artificial Sequence: Synthetic oligonucleotide
  source 1..19: mol_type = other RNA
ggaccccattcgactactg

SEQ ID NO: 2136 - RNA, 19 nt, synthetic construct
  misc_feature 1..19: note = Description of Artificial Sequence: Synthetic oligonucleotide
  source 1..19: mol_type = other RNA
gaccccattcgactactgt

SEQ ID NO: 2137 - RNA, 19 nt, synthetic construct
  misc_feature 1..19: note = Description of Artificial Sequence: Synthetic oligonucleotide
  source 1..19: mol_type = other RNA
accccattcgactactgtg

SEQ ID NO: 2138 - RNA, 19 nt, synthetic construct
  misc_feature 1..19: note = Description of Artificial Sequence: Synthetic oligonucleotide
  source 1..19: mol_type = other RNA
ccccattcgactactgtgc

SEQ ID NO: 2139 - RNA, 19 nt, synthetic construct
  misc_feature 1..19: note = Description of Artificial Sequence: Synthetic oligonucleotide
  source 1..19: mol_type = other RNA
cccattcgactactgtgcc

SEQ ID NO: 2140 - RNA, 19 nt, synthetic construct
  misc_feature 1..19: note = Description of Artificial Sequence: Synthetic oligonucleotide
  source 1..19: mol_type = other RNA
ccattcgactactgtgccc

SEQ ID NO: 2141 - RNA, 19 nt, synthetic construct
  misc_feature 1..19: note = Description of Artificial Sequence: Synthetic oligonucleotide
  source 1..19: mol_type = other RNA
cattcgactactgtgccct

SEQ ID NO: 2142 - RNA, 19 nt, synthetic construct
  misc_feature 1..19: note = Description of Artificial Sequence: Synthetic oligonucleotide
  source 1..19: mol_type = other RNA
attcgactactgtgccctg

SEQ ID NO: 2143 - RNA, 19 nt, synthetic construct
  misc_feature 1..19: note = Description of Artificial Sequence: Synthetic oligonucleotide
  source 1..19: mol_type = other RNA
ttcgactactgtgccctgc

SEQ ID NO: 2144 - RNA, 19 nt, synthetic construct
  misc_feature 1..19: note = Description of Artificial Sequence: Synthetic oligonucleotide
  source 1..19: mol_type = other RNA
tcgactactgtgccctgcg

SEQ ID NO: 2145 - RNA, 19 nt, synthetic construct
  misc_feature 1..19: note = Description of Artificial Sequence: Synthetic oligonucleotide
  source 1..19: mol_type = other RNA
cgactactgtgccctgcga

SEQ ID NO: 2146 - RNA, 19 nt, synthetic construct
  misc_feature 1..19: note = Description of Artificial Sequence: Synthetic oligonucleotide
  source 1..19: mol_type = other RNA
gactactgtgccctgcgac

SEQ ID NO: 2147 - RNA, 19 nt, synthetic construct
  misc_feature 1..19: note = Description of Artificial Sequence: Synthetic oligonucleotide
  source 1..19: mol_type = other RNA
actactgtgccctgcgacg

SEQ ID NO: 2148 - RNA, 19 nt, synthetic construct
  misc_feature 1..19: note = Description of Artificial Sequence: Synthetic oligonucleotide
  source 1..19: mol_type = other RNA
ctactgtgccctgcgacgc

SEQ ID NO: 2149 - RNA, 19 nt, synthetic construct
  misc_feature 1..19: note = Description of Artificial Sequence: Synthetic oligonucleotide
  source 1..19: mol_type = other RNA
tactgtgccctgcgacgct

SEQ ID NO: 2150 - RNA, 19 nt, synthetic construct
  misc_feature 1..19: note = Description of Artificial Sequence: Synthetic oligonucleotide
  source 1..19: mol_type = other RNA
actgtgccctgcgacgctg

SEQ ID NO: 2151 - RNA, 19 nt, synthetic construct
  misc_feature 1..19: note = Description of Artificial Sequence: Synthetic oligonucleotide
  source 1..19: mol_type = other RNA
ctgtgccctgcgacgctgc

SEQ ID NO: 2152 - RNA, 19 nt, synthetic construct
  misc_feature 1..19: note = Description of Artificial Sequence: Synthetic oligonucleotide
  source 1..19: mol_type = other RNA
tgtgccctgcgacgctgcg

SEQ ID NO: 2153 - RNA, 19 nt, synthetic construct
  misc_feature 1..19: note = Description of Artificial Sequence: Synthetic oligonucleotide
  source 1..19: mol_type = other RNA
gtgccctgcgacgctgcgc

SEQ ID NO: 2154 - RNA, 19 nt, synthetic construct
  misc_feature 1..19: note = Description of Artificial Sequence: Synthetic oligonucleotide
  source 1..19: mol_type = other RNA
tgccctgcgacgctgcgct

SEQ ID NO: 2155 - RNA, 19 nt, synthetic construct
  misc_feature 1..19: note = Description of Artificial Sequence: Synthetic oligonucleotide
  source 1..19: mol_type = other RNA
gccctgcgacgctgcgctg

SEQ ID NO: 2156 - RNA, 19 nt, synthetic construct
  misc_feature 1..19: note = Description of Artificial Sequence: Synthetic oligonucleotide
  source 1..19: mol_type = other RNA
ccctgcgacgctgcgctga

SEQ ID NO: 2157 - RNA, 19 nt, synthetic construct
  misc_feature 1..19: note = Description of Artificial Sequence: Synthetic oligonucleotide
  source 1..19: mol_type = other RNA
cctgcgacgctgcgctgat

SEQ ID NO: 2158 - RNA, 19 nt, synthetic construct
  misc_feature 1..19: note = Description of Artificial Sequence: Synthetic oligonucleotide
  source 1..19: mol_type = other RNA
ctgcgacgctgcgctgatg

SEQ ID NO: 2159 - RNA, 19 nt, synthetic construct
  misc_feature 1..19: note = Description of Artificial Sequence: Synthetic oligonucleotide
  source 1..19: mol_type = other RNA
tgcgacgctgcgctgatga

SEQ ID NO: 2160 - RNA, 19 nt, synthetic construct
  misc_feature 1..19: note = Description of Artificial Sequence: Synthetic oligonucleotide
  source 1..19: mol_type = other RNA
gcgacgctgcgctgatgac

SEQ ID NO: 2161 - RNA, 19 nt, synthetic construct
  misc_feature 1..19: note = Description of Artificial Sequence: Synthetic oligonucleotide
  source 1..19: mol_type = other RNA
cgacgctgcgctgatgacc

SEQ ID NO: 2162 - RNA, 19 nt, synthetic construct
  misc_feature 1..19: note = Description of Artificial Sequence: Synthetic oligonucleotide
  source 1..19: mol_type = other RNA
gacgctgcgctgatgacca

SEQ ID NO: 2163 - RNA, 19 nt, synthetic construct
  misc_feature 1..19: note = Description of Artificial Sequence: Synthetic oligonucleotide
  source 1..19: mol_type = other RNA
acgctgcgctgatgaccag

SEQ ID NO: 2164 - RNA, 19 nt, synthetic construct
  misc_feature 1..19: note = Description of Artificial Sequence: Synthetic oligonucleotide
  source 1..19: mol_type = other RNA
cgctgcgctgatgaccagc

SEQ ID NO: 2165 - RNA, 19 nt, synthetic construct
  misc_feature 1..19: note = Description of Artificial Sequence: Synthetic oligonucleotide
  source 1..19: mol_type = other RNA
gctgcgctgatgaccagcc

SEQ ID NO: 2166 - RNA, 19 nt, synthetic construct
  misc_feature 1..19: note = Description of Artificial Sequence: Synthetic oligonucleotide
  source 1..19: mol_type = other RNA
ctgcgctgatgaccagccg

SEQ ID NO: 2167 - RNA, 19 nt, synthetic construct
  misc_feature 1..19: note = Description of Artificial Sequence: Synthetic oligonucleotide
  source 1..19: mol_type = other RNA
tgcgctgatgaccagccgc

SEQ ID NO: 2168 - RNA, 19 nt, synthetic construct
  misc_feature 1..19: note = Description of Artificial Sequence: Synthetic oligonucleotide
  source 1..19: mol_type = other RNA
gcgctgatgaccagccgcc

SEQ ID NO: 2169 - RNA, 19 nt, synthetic construct
  misc_feature 1..19: note = Description of Artificial Sequence: Synthetic oligonucleotide
  source 1..19: mol_type = other RNA
cgctgatgaccagccgcca

SEQ ID NO: 2170 - RNA, 19 nt, synthetic construct
  misc_feature 1..19: note = Description of Artificial Sequence: Synthetic oligonucleotide
  source 1..19: mol_type = other RNA
gctgatgaccagccgccat

SEQ ID NO: 2171 - RNA, 19 nt, synthetic construct
  misc_feature 1..19: note = Description of Artificial Sequence: Synthetic oligonucleotide
  source 1..19: mol_type = other RNA
ctgatgaccagccgccatc

SEQ ID NO: 2172 - RNA, 19 nt, synthetic construct
  misc_feature 1..19: note = Description of Artificial Sequence: Synthetic oligonucleotide
  source 1..19: mol_type = other RNA
tgatgaccagccgccatca

SEQ ID NO: 2173 - RNA, 19 nt, synthetic construct
  misc_feature 1..19: note = Description of Artificial Sequence: Synthetic oligonucleotide
  source 1..19: mol_type = other RNA
gatgaccagccgccatcaa

SEQ ID NO: 2174 - RNA, 19 nt, synthetic construct
  misc_feature 1..19: note = Description of Artificial Sequence: Synthetic oligonucleotide
  source 1..19: mol_type = other RNA
atgaccagccgccatcaat

SEQ ID NO: 2175 - RNA, 19 nt, synthetic construct
  misc_feature 1..19: note = Description of Artificial Sequence: Synthetic oligonucleotide
  source 1..19: mol_type = other RNA
tgaccagccgccatcaatc

SEQ ID NO: 2176 - RNA, 19 nt, synthetic construct
  misc_feature 1..19: note = Description of Artificial Sequence: Synthetic oligonucleotide
  source 1..19: mol_type = other RNA
gaccagccgccatcaatcc

SEQ ID NO: 2177 - RNA, 19 nt, synthetic construct
  misc_feature 1..19: note = Description of Artificial Sequence: Synthetic oligonucleotide
  source 1..19: mol_type = other RNA
accagccgccatcaatcct

SEQ ID NO: 2178 - RNA, 19 nt, synthetic construct
  misc_feature 1..19: note = Description of Artificial Sequence: Synthetic oligonucleotide
  source 1..19: mol_type = other RNA
ccagccgccatcaatcctg

SEQ ID NO: 2179 - RNA, 19 nt, synthetic construct
  misc_feature 1..19: note = Description of Artificial Sequence: Synthetic oligonucleotide
  source 1..19: mol_type = other RNA
cagccgccatcaatcctgg

SEQ ID NO: 2180 - RNA, 19 nt, synthetic construct
  misc_feature 1..19: note = Description of Artificial Sequence: Synthetic oligonucleotide
  source 1..19: mol_type = other RNA
agccgccatcaatcctgga

SEQ ID NO: 2181 - RNA, 19 nt, synthetic construct
  misc_feature 1..19: note = Description of Artificial Sequence: Synthetic oligonucleotide
  source 1..19: mol_type = other RNA
gccgccatcaatcctggac

SEQ ID NO: 2182 - RNA, 19 nt, synthetic construct
  misc_feature 1..19: note = Description of Artificial Sequence: Synthetic oligonucleotide
  source 1..19: mol_type = other RNA
ccgccatcaatcctggacc

SEQ ID NO: 2183 - RNA, 19 nt, synthetic construct
  misc_feature 1..19: note = Description of Artificial Sequence: Synthetic oligonucleotide
  source 1..19: mol_type = other RNA
cgccatcaatcctggaccc

SEQ ID NO: 2184 - RNA, 19 nt, synthetic construct
  misc_feature 1..19: note = Description of Artificial Sequence: Synthetic oligonucleotide
  source 1..19: mol_type = other RNA
gccatcaatcctggacccc

SEQ ID NO: 2185 - RNA, 19 nt, synthetic construct
  misc_feature 1..19: note = Description of Artificial Sequence: Synthetic oligonucleotide
  source 1..19: mol_type = other RNA
ccatcaatcctggaccccc

SEQ ID NO: 2186 - RNA, 19 nt, synthetic construct
  misc_feature 1..19: note = Description of Artificial Sequence: Synthetic oligonucleotide
  source 1..19: mol_type = other RNA
catcaatcctggacccccc

SEQ ID NO: 2187 - RNA, 19 nt, synthetic construct
  misc_feature 1..19: note = Description of Artificial Sequence: Synthetic oligonucleotide
  source 1..19: mol_type = other RNA
atcaatcctggacccccca

SEQ ID NO: 2188 - RNA, 19 nt, synthetic construct
  misc_feature 1..19: note = Description of Artificial Sequence: Synthetic oligonucleotide
  source 1..19: mol_type = other RNA
tcaatcctggaccccccag

SEQ ID NO: 2189 - RNA, 19 nt, synthetic construct
  misc_feature 1..19: note = Description of Artificial Sequence: Synthetic oligonucleotide
  source 1..19: mol_type = other RNA
caatcctggaccccccaga

SEQ ID NO: 2190 - RNA, 19 nt, synthetic construct
  misc_feature 1..19: note = Description of Artificial Sequence: Synthetic oligonucleotide
  source 1..19: mol_type = other RNA
aatcctggaccccccagac

SEQ ID NO: 2191 - RNA, 19 nt, synthetic construct
  misc_feature 1..19: note = Description of Artificial Sequence: Synthetic oligonucleotide
  source 1..19: mol_type = other RNA
atcctggaccccccagacc

SEQ ID NO: 2192 - RNA, 19 nt, synthetic construct
  misc_feature 1..19: note = Description of Artificial Sequence: Synthetic oligonucleotide
  source 1..19: mol_type = other RNA
tcctggaccccccagacca

SEQ ID NO: 2193 - RNA, 19 nt, synthetic construct
  misc_feature 1..19: note = Description of Artificial Sequence: Synthetic oligonucleotide
  source 1..19: mol_type = other RNA
cctggaccccccagaccag

SEQ ID NO: 2194 - RNA, 19 nt, synthetic construct
  misc_feature 1..19: note = Description of Artificial Sequence: Synthetic oligonucleotide
  source 1..19: mol_type = other RNA
ctggaccccccagaccagg

SEQ ID NO: 2195 - RNA, 19 nt, synthetic construct
  misc_feature 1..19: note = Description of Artificial Sequence: Synthetic oligonucleotide
  source 1..19: mol_type = other RNA
tggaccccccagaccaggt

SEQ ID NO: 2196 - RNA, 19 nt, synthetic construct
  misc_feature 1..19: note = Description of Artificial Sequence: Synthetic oligonucleotide
  source 1..19: mol_type = other RNA
ggaccccccagaccaggtg

SEQ ID NO: 2197 - RNA, 19 nt, synthetic construct
  misc_feature 1..19: note = Description of Artificial Sequence: Synthetic oligonucleotide
  source 1..19: mol_type = other RNA
gaccccccagaccaggtgc

SEQ ID NO: 2198 - RNA, 19 nt, synthetic construct
  misc_feature 1..19: note = Description of Artificial Sequence: Synthetic oligonucleotide
  source 1..19: mol_type = other RNA
accccccagaccaggtgca

SEQ ID NO: 2199 - RNA, 19 nt, synthetic construct
  misc_feature 1..19: note = Description of Artificial Sequence: Synthetic oligonucleotide
  source 1..19: mol_type = other RNA
ccccccagaccaggtgcag

SEQ ID NO: 2200 - RNA, 19 nt, synthetic construct
  misc_feature 1..19: note = Description of Artificial Sequence: Synthetic oligonucleotide
  source 1..19: mol_type = other RNA
cccccagaccaggtgcagt

SEQ ID NO: 2201 - RNA, 19 nt, synthetic construct
  misc_feature 1..19: note = Description of Artificial Sequence: Synthetic oligonucleotide
  source 1..19: mol_type = other RNA
ccccagaccaggtgcagtt

SEQ ID NO: 2202 - RNA, 19 nt, synthetic construct
  misc_feature 1..19: note = Description of Artificial Sequence: Synthetic oligonucleotide
  source 1..19: mol_type = other RNA
cccagaccaggtgcagttt

SEQ ID NO: 2203 - RNA, 19 nt, synthetic construct
  misc_feature 1..19: note = Description of Artificial Sequence: Synthetic oligonucleotide
  source 1..19: mol_type = other RNA
ccagaccaggtgcagtttg

SEQ ID NO: 2204 - RNA, 19 nt, synthetic construct
  misc_feature 1..19: note = Description of Artificial Sequence: Synthetic oligonucleotide
  source 1..19: mol_type = other RNA
cagaccaggtgcagtttga

SEQ ID NO: 2205 - RNA, 19 nt, synthetic construct
  misc_feature 1..19: note = Description of Artificial Sequence: Synthetic oligonucleotide
  source 1..19: mol_type = other RNA
agaccaggtgcagtttgag

SEQ ID NO: 2206 - RNA, 19 nt, synthetic construct
  misc_feature 1..19: note = Description of Artificial Sequence: Synthetic oligonucleotide
  source 1..19: mol_type = other RNA
gaccaggtgcagtttgaga

SEQ ID NO: 2207 - RNA, 19 nt, synthetic construct
  misc_feature 1..19: note = Description of Artificial Sequence: Synthetic oligonucleotide
  source 1..19: mol_type = other RNA
accaggtgcagtttgagaa

SEQ ID NO: 2208 - RNA, 19 nt, synthetic construct
  misc_feature 1..19: note = Description of Artificial Sequence: Synthetic oligonucleotide
  source 1..19: mol_type = other RNA
ccaggtgcagtttgagaag

SEQ ID NO: 2209 - RNA, 19 nt, synthetic construct
  misc_feature 1..19: note = Description of Artificial Sequence: Synthetic oligonucleotide
  source 1..19: mol_type = other RNA
caggtgcagtttgagaagt

SEQ ID NO: 2210 - RNA, 19 nt, synthetic construct
  misc_feature 1..19: note = Description of Artificial Sequence: Synthetic oligonucleotide
  source 1..19: mol_type = other RNA
aggtgcagtttgagaagtg

SEQ ID NO: 2211 - RNA, 19 nt, synthetic construct
  misc_feature 1..19: note = Description of Artificial Sequence: Synthetic oligonucleotide
  source 1..19: mol_type = other RNA
ggtgcagtttgagaagtgt

SEQ ID NO: 2212 - RNA, 19 nt, synthetic construct
  misc_feature 1..19: note = Description of Artificial Sequence: Synthetic oligonucleotide
  source 1..19: mol_type = other RNA
gtgcagtttgagaagtgtg

SEQ ID NO: 2213 - RNA, 19 nt, synthetic construct
  misc_feature 1..19: note = Description of Artificial Sequence: Synthetic oligonucleotide
  source 1..19: mol_type = other RNA
tgcagtttgagaagtgtgg

SEQ ID NO: 2214 - RNA, 19 nt, synthetic construct
  misc_feature 1..19: note = Description of Artificial Sequence: Synthetic oligonucleotide
  source 1..19: mol_type = other RNA
gcagtttgagaagtgtggc

SEQ ID NO: 2215 - RNA, 19 nt, synthetic construct
  misc_feature 1..19: note = Description of Artificial Sequence: Synthetic oligonucleotide
  source 1..19: mol_type = other RNA
cagtttgagaagtgtggca

SEQ ID NO: 2216 - RNA, 19 nt, synthetic construct
  misc_feature 1..19: note = Description of Artificial Sequence: Synthetic oligonucleotide
  source 1..19: mol_type = other RNA
agtttgagaagtgtggcaa

SEQ ID NO: 2217 - RNA, 19 nt, synthetic construct
  misc_feature 1..19: note = Description of Artificial Sequence: Synthetic oligonucleotide
  source 1..19: mol_type = other RNA
gtttgagaagtgtggcaag

SEQ ID NO: 2218 - RNA, 19 nt, synthetic construct
  misc_feature 1..19: note = Description of Artificial Sequence: Synthetic oligonucleotide
  source 1..19: mol_type = other RNA
tttgagaagtgtggcaaga

SEQ ID NO: 2219 - RNA, 19 nt, synthetic construct
  misc_feature 1..19: note = Description of Artificial Sequence: Synthetic oligonucleotide
  source 1..19: mol_type = other RNA
ttgagaagtgtggcaagag

SEQ ID NO: 2220 - RNA, 19 nt, synthetic construct
  misc_feature 1..19: note = Description of Artificial Sequence: Synthetic oligonucleotide
  source 1..19: mol_type = other RNA
tgagaagtgtggcaagagg

SEQ ID NO: 2221 - RNA, 19 nt, synthetic construct
  misc_feature 1..19: note = Description of Artificial Sequence: Synthetic oligonucleotide
  source 1..19: mol_type = other RNA
gagaagtgtggcaagaggg

SEQ ID NO: 2222 - RNA, 19 nt, synthetic construct
  misc_feature 1..19: note = Description of Artificial Sequence: Synthetic oligonucleotide
  source 1..19: mol_type = other RNA
agaagtgtggcaagagggt

SEQ ID NO: 2223 - RNA, 19 nt, synthetic construct
  misc_feature 1..19: note = Description of Artificial Sequence: Synthetic oligonucleotide
  source 1..19: mol_type = other RNA
gaagtgtggcaagagggtg

SEQ ID NO: 2224 - RNA, 19 nt, synthetic construct
  misc_feature 1..19: note = Description of Artificial Sequence: Synthetic oligonucleotide
  source 1..19: mol_type = other RNA
aagtgtggcaagagggtgg

SEQ ID NO: 2225 - RNA, 19 nt, synthetic construct
  misc_feature 1..19: note = Description of Artificial Sequence: Synthetic oligonucleotide
  source 1..19: mol_type = other RNA
agtgtggcaagagggtgga

SEQ ID NO: 2226 - RNA, 19 nt, synthetic construct
  misc_feature 1..19: note = Description of Artificial Sequence: Synthetic oligonucleotide
  source 1..19: mol_type = other RNA
gtgtggcaagagggtggat

SEQ ID NO: 2227 - RNA, 19 nt, synthetic construct
  misc_feature 1..19: note = Description of Artificial Sequence: Synthetic oligonucleotide
  source 1..19: mol_type = other RNA
tgtggcaagagggtggatc

SEQ ID NO: 2228 - RNA, 19 nt, synthetic construct
  misc_feature 1..19: note = Description of Artificial Sequence: Synthetic oligonucleotide
  source 1..19: mol_type = other RNA
gtggcaagagggtggatcg

SEQ ID NO: 2229 - RNA, 19 nt, synthetic construct
  misc_feature 1..19: note = Description of Artificial Sequence: Synthetic oligonucleotide
  source 1..19: mol_type = other RNA
tggcaagagggtggatcgg

SEQ ID NO: 2230 - RNA, 19 nt, synthetic construct
  misc_feature 1..19: note = Description of Artificial Sequence: Synthetic oligonucleotide
  source 1..19: mol_type = other RNA
ggcaagagggtggatcggc

SEQ ID NO: 2231 - RNA, 19 nt, synthetic construct
  misc_feature 1..19: note = Description of Artificial Sequence: Synthetic oligonucleotide
  source 1..19: mol_type = other RNA
gcaagagggtggatcggct

SEQ ID NO: 2232 - RNA, 19 nt, synthetic construct
  misc_feature 1..19: note = Description of Artificial Sequence: Synthetic oligonucleotide
  source 1..19: mol_type = other RNA
caagagggtggatcggctg

SEQ ID NO: 2233 - RNA, 19 nt, synthetic construct
  misc_feature 1..19: note = Description of Artificial Sequence: Synthetic oligonucleotide
  source 1..19: mol_type = other RNA
aagagggtggatcggctgg

SEQ ID NO: 2234 - RNA, 19 nt, synthetic construct
  misc_feature 1..19: note = Description of Artificial Sequence: Synthetic oligonucleotide
  source 1..19: mol_type = other RNA
agagggtggatcggctgga

SEQ ID NO: 2235 - RNA, 19 nt, synthetic construct
  misc_feature 1..19: note = Description of Artificial Sequence: Synthetic oligonucleotide
  source 1..19: mol_type = other RNA
gagggtggatcggctggat

SEQ ID NO: 2236 - RNA, 19 nt, synthetic construct
  misc_feature 1..19: note = Description of Artificial Sequence: Synthetic oligonucleotide
  source 1..19: mol_type = other RNA
agggtggatcggctggatc

SEQ ID NO: 2237 - RNA, 19 nt, synthetic construct
  misc_feature 1..19: note = Description of Artificial Sequence: Synthetic oligonucleotide
  source 1..19: mol_type = other RNA
gggtggatcggctggatca

SEQ ID NO: 2238 - RNA, 19 nt, synthetic construct
  misc_feature 1..19: note = Description of Artificial Sequence: Synthetic oligonucleotide
  source 1..19: mol_type = other RNA
ggtggatcggctggatcag

SEQ ID NO: 2239 - RNA, 19 nt, synthetic construct
  misc_feature 1..19: note = Description of Artificial Sequence: Synthetic oligonucleotide
  source 1..19: mol_type = other RNA
gtggatcggctggatcagc

SEQ ID NO: 2240 - RNA, 19 nt, synthetic construct
  misc_feature 1..19: note = Description of Artificial Sequence: Synthetic oligonucleotide
  source 1..19: mol_type = other RNA
tggatcggctggatcagcg

SEQ ID NO: 2241 - RNA, 19 nt, synthetic construct
  misc_feature 1..19: note = Description of Artificial Sequence: Synthetic oligonucleotide
  source 1..19: mol_type = other RNA
ggatcggctggatcagcgg

SEQ ID NO: 2242 - RNA, 19 nt, synthetic construct
  misc_feature 1..19: note = Description of Artificial Sequence: Synthetic oligonucleotide
  source 1..19: mol_type = other RNA
gatcggctggatcagcggc

SEQ ID NO: 2243 - RNA, 19 nt, synthetic construct
  misc_feature 1..19: note = Description of Artificial Sequence: Synthetic oligonucleotide
  source 1..19: mol_type = other RNA
atcggctggatcagcggcg

SEQ ID NO: 2244 - RNA, 19 nt, synthetic construct
  misc_feature 1..19: note = Description of Artificial Sequence: Synthetic oligonucleotide
  source 1..19: mol_type = other RNA
tcggctggatcagcggcgt

SEQ ID NO: 2245 - RNA, 19 nt, synthetic construct
  misc_feature 1..19: note = Description of Artificial Sequence: Synthetic oligonucleotide
  source 1..19: mol_type = other RNA
cggctggatcagcggcgtt

SEQ ID NO: 2246 - RNA, 19 nt, synthetic construct
  misc_feature 1..19: note = Description of Artificial Sequence: Synthetic oligonucleotide
  source 1..19: mol_type = other RNA
ggctggatcagcggcgttc

SEQ ID NO: 2247 - RNA, 19 nt, synthetic construct
  misc_feature 1..19: note = Description of Artificial Sequence: Synthetic oligonucleotide
  source 1..19: mol_type = other RNA
gctggatcagcggcgttcc

SEQ ID NO: 2248 - RNA, 19 nt, synthetic construct
  misc_feature 1..19: note = Description of Artificial Sequence: Synthetic oligonucleotide
  source 1..19: mol_type = other RNA
ctggatcagcggcgttcca

SEQ ID NO: 2249 - RNA, 19 nt, synthetic construct
  misc_feature 1..19: note = Description of Artificial Sequence: Synthetic oligonucleotide
  source 1..19: mol_type = other RNA
tggatcagcggcgttccaa

SEQ ID NO: 2250 - RNA, 19 nt, synthetic construct
  misc_feature 1..19: note = Description of Artificial Sequence: Synthetic oligonucleotide
  source 1..19: mol_type = other RNA
ggatcagcggcgttccaag

SEQ ID NO: 2251 - RNA, 19 nt, synthetic construct
  misc_feature 1..19: note = Description of Artificial Sequence: Synthetic oligonucleotide
  source 1..19: mol_type = other RNA
gatcagcggcgttccaagc

SEQ ID NO: 2252 - RNA, 19 nt, synthetic construct
  misc_feature 1..19: note = Description of Artificial Sequence: Synthetic oligonucleotide
  source 1..19: mol_type = other RNA
atcagcggcgttccaagct

SEQ ID NO: 2253 - RNA, 19 nt, synthetic construct
  misc_feature 1..19: note = Description of Artificial Sequence: Synthetic oligonucleotide
  source 1..19: mol_type = other RNA
tcagcggcgttccaagctg

SEQ ID NO: 2254 - RNA, 19 nt, synthetic construct
  misc_feature 1..19: note = Description of Artificial Sequence: Synthetic oligonucleotide
  source 1..19: mol_type = other RNA
cagcggcgttccaagctgc

SEQ ID NO: 2255 - RNA, 19 nt, synthetic construct
  misc_feature 1..19: note = Description of Artificial Sequence: Synthetic oligonucleotide
  source 1..19: mol_type = other RNA
agcggcgttccaagctgcg

SEQ ID NO: 2256 - RNA, 19 nt, synthetic construct
  misc_feature 1..19: note = Description of Artificial Sequence: Synthetic oligonucleotide
  source 1..19: mol_type = other RNA
gcggcgttccaagctgcgc

SEQ ID NO: 2257 - RNA, 19 nt, synthetic construct
  misc_feature 1..19: note = Description of Artificial Sequence: Synthetic oligonucleotide
  source 1..19: mol_type = other RNA
cggcgttccaagctgcgcg

SEQ ID NO: 2258 - RNA, 19 nt, synthetic construct
  misc_feature 1..19: note = Description of Artificial Sequence: Synthetic oligonucleotide
  source 1..19: mol_type = other RNA
ggcgttccaagctgcgcgt

SEQ ID NO: 2259 - RNA, 19 nt, synthetic construct
  misc_feature 1..19: note = Description of Artificial Sequence: Synthetic oligonucleotide
  source 1..19: mol_type = other RNA
gcgttccaagctgcgcgtg

SEQ ID NO: 2260 - RNA, 19 nt, synthetic construct
  misc_feature 1..19: note = Description of Artificial Sequence: Synthetic oligonucleotide
  source 1..19: mol_type = other RNA
cgttccaagctgcgcgtgg

SEQ ID NO: 2261 - RNA, 19 nt, synthetic construct
  misc_feature 1..19: note = Description of Artificial Sequence: Synthetic oligonucleotide
  source 1..19: mol_type = other RNA
gttccaagctgcgcgtggt

SEQ ID NO: 2262 - RNA, 19 nt, synthetic construct
  misc_feature 1..19: note = Description of Artificial Sequence: Synthetic oligonucleotide
  source 1..19: mol_type = other RNA
ttccaagctgcgcgtggtt

SEQ ID NO: 2263 - RNA, 19 nt, synthetic construct
  misc_feature 1..19: note = Description of Artificial Sequence: Synthetic oligonucleotide
  source 1..19: mol_type = other RNA
tccaagctgcgcgtggttg

SEQ ID NO: 2264 - RNA, 19 nt, synthetic construct
  misc_feature 1..19: note = Description of Artificial Sequence: Synthetic oligonucleotide
  source 1..19: mol_type = other RNA
ccaagctgcgcgtggttgg

SEQ ID NO: 2265 - RNA, 19 nt, synthetic construct
  misc_feature 1..19: note = Description of Artificial Sequence: Synthetic oligonucleotide
  source 1..19: mol_type = other RNA
caagctgcgcgtggttggg

SEQ ID NO: 2266 - RNA, 19 nt, synthetic construct
  misc_feature 1..19: note = Description of Artificial Sequence: Synthetic oligonucleotide
  source 1..19: mol_type = other RNA
aagctgcgcgtggttgggg

SEQ ID NO: 2267 - RNA, 19 nt, synthetic construct
  misc_feature 1..19: note = Description of Artificial Sequence: Synthetic oligonucleotide
  source 1..19: mol_type = other RNA
agctgcgcgtggttggggg

SEQ ID NO: 2268 - RNA, 19 nt, synthetic construct
  misc_feature 1..19: note = Description of Artificial Sequence: Synthetic oligonucleotide
  source 1..19: mol_type = other RNA
gctgcgcgtggttgggggc

SEQ ID NO: 2269 - RNA, 19 nt, synthetic construct
  misc_feature 1..19: note = Description of Artificial Sequence: Synthetic oligonucleotide
  source 1..19: mol_type = other RNA
ctgcgcgtggttgggggcc

SEQ ID NO: 2270 - RNA, 19 nt, synthetic construct
  misc_feature 1..19: note = Description of Artificial Sequence: Synthetic oligonucleotide
  source 1..19: mol_type = other RNA
tgcgcgtggttgggggcca

SEQ ID NO: 2271 - RNA, 19 nt, synthetic construct
  misc_feature 1..19: note = Description of Artificial Sequence: Synthetic oligonucleotide
  source 1..19: mol_type = other RNA
gcgcgtggttgggggccat

SEQ ID NO: 2272 - RNA, 19 nt, synthetic construct
  misc_feature 1..19: note = Description of Artificial Sequence: Synthetic oligonucleotide
  source 1..19: mol_type = other RNA
cgcgtggttgggggccatc

SEQ ID NO: 2273 - RNA, 19 nt, synthetic construct
  misc_feature 1..19: note = Description of Artificial Sequence: Synthetic oligonucleotide
  source 1..19: mol_type = other RNA
gcgtggttgggggccatcc

SEQ ID NO: 2274 - RNA, 19 nt, synthetic construct
  misc_feature 1..19: note = Description of Artificial Sequence: Synthetic oligonucleotide
  source 1..19: mol_type = other RNA
cgtggttgggggccatccg

SEQ ID NO: 2275 - RNA, 19 nt, synthetic construct
  misc_feature 1..19: note = Description of Artificial Sequence: Synthetic oligonucleotide
  source 1..19: mol_type = other RNA
gtggttgggggccatccgg

SEQ ID NO: 2276 - RNA, 19 nt, synthetic construct
  misc_feature 1..19: note = Description of Artificial Sequence: Synthetic oligonucleotide
  source 1..19: mol_type = other RNA
tggttgggggccatccggg

SEQ ID NO: 2277 - RNA, 19 nt, synthetic construct
  misc_feature 1..19: note = Description of Artificial Sequence: Synthetic oligonucleotide
  source 1..19: mol_type = other RNA
ggttgggggccatccgggc

SEQ ID NO: 2278 - RNA, 19 nt, synthetic construct
  misc_feature 1..19: note = Description of Artificial Sequence: Synthetic oligonucleotide
  source 1..19: mol_type = other RNA
gttgggggccatccgggca

SEQ ID NO: 2279 - RNA, 19 nt, synthetic construct
  misc_feature 1..19: note = Description of Artificial Sequence: Synthetic oligonucleotide
  source 1..19: mol_type = other RNA
ttgggggccatccgggcaa

SEQ ID NO: 2280 - RNA, 19 nt, synthetic construct
  misc_feature 1..19: note = Description of Artificial Sequence: Synthetic oligonucleotide
  source 1..19: mol_type = other RNA
tgggggccatccgggcaac

SEQ ID NO: 2281 - RNA, 19 nt, synthetic construct
  misc_feature 1..19: note = Description of Artificial Sequence: Synthetic oligonucleotide
  source 1..19: mol_type = other RNA
gggggccatccgggcaact

SEQ ID NO: 2282 - RNA, 19 nt, synthetic construct
  misc_feature 1..19: note = Description of Artificial Sequence: Synthetic oligonucleotide
  source 1..19: mol_type = other RNA
ggggccatccgggcaactc

SEQ ID NO: 2283 - RNA, 19 nt, synthetic construct
  misc_feature 1..19: note = Description of Artificial Sequence: Synthetic oligonucleotide
  source 1..19: mol_type = other RNA
gggccatccgggcaactca

SEQ ID NO: 2284 - RNA, 19 nt, synthetic construct
  misc_feature 1..19: note = Description of Artificial Sequence: Synthetic oligonucleotide
  source 1..19: mol_type = other RNA
ggccatccgggcaactcac

SEQ ID NO: 2285 - RNA, 19 nt, synthetic construct
  misc_feature 1..19: note = Description of Artificial Sequence: Synthetic oligonucleotide
  source 1..19: mol_type = other RNA
gccatccgggcaactcacc

SEQ ID NO: 2286 - RNA, 19 nt, synthetic construct
  misc_feature 1..19: note = Description of Artificial Sequence: Synthetic oligonucleotide
  source 1..19: mol_type = other RNA
ccatccgggcaactcaccc

SEQ ID NO: 2287 - RNA, 19 nt, synthetic construct
  misc_feature 1..19: note = Description of Artificial Sequence: Synthetic oligonucleotide
  source 1..19: mol_type = other RNA
catccgggcaactcaccct

SEQ ID NO: 2288 - RNA, 19 nt, synthetic construct
  misc_feature 1..19: note = Description of Artificial Sequence: Synthetic oligonucleotide
  source 1..19: mol_type = other RNA
atccgggcaactcaccctg

SEQ ID NO: 2289 - RNA, 19 nt, synthetic construct
  misc_feature 1..19: note = Description of Artificial Sequence: Synthetic oligonucleotide
  source 1..19: mol_type = other RNA
tccgggcaactcaccctgg

SEQ ID NO: 2290 - RNA, 19 nt, synthetic construct
  misc_feature 1..19: note = Description of Artificial Sequence: Synthetic oligonucleotide
  source 1..19: mol_type = other RNA
ccgggcaactcaccctgga

SEQ ID NO: 2291 - RNA, 19 nt, synthetic construct
  misc_feature 1..19: note = Description of Artificial Sequence: Synthetic oligonucleotide
  source 1..19: mol_type = other RNA
cgggcaactcaccctggac

SEQ ID NO: 2292 - RNA, 19 nt, synthetic construct
  misc_feature 1..19: note = Description of Artificial Sequence: Synthetic oligonucleotide
  source 1..19: mol_type = other RNA
gggcaactcaccctggaca

SEQ ID NO: 2293 - RNA, 19 nt, synthetic construct
  misc_feature 1..19: note = Description of Artificial Sequence: Synthetic oligonucleotide
  source 1..19: mol_type = other RNA
ggcaactcaccctggacag

SEQ ID NO: 2294 - RNA, 19 nt, synthetic construct
  misc_feature 1..19: note = Description of Artificial Sequence: Synthetic oligonucleotide
  source 1..19: mol_type = other RNA
gcaactcaccctggacagt

SEQ ID NO: 2295 - RNA, 19 nt, synthetic construct
  misc_feature 1..19: note = Description of Artificial Sequence: Synthetic oligonucleotide
  source 1..19: mol_type = other RNA
caactcaccctggacagtc

SEQ ID NO: 2296 - RNA, 19 nt, synthetic construct
  misc_feature 1..19: note = Description of Artificial Sequence: Synthetic oligonucleotide
  source 1..19: mol_type = other RNA
aactcaccctggacagtca

SEQ ID NO: 2297 - RNA, 19 nt, synthetic construct
  misc_feature 1..19: note = Description of Artificial Sequence: Synthetic oligonucleotide
  source 1..19: mol_type = other RNA
actcaccctggacagtcag

SEQ ID NO: 2298 - RNA, 19 nt, synthetic construct
  misc_feature 1..19: note = Description of Artificial Sequence: Synthetic oligonucleotide
  source 1..19: mol_type = other RNA
ctcaccctggacagtcagc

SEQ ID NO: 2299 - RNA, 19 nt, synthetic construct
  misc_feature 1..19: note = Description of Artificial Sequence: Synthetic oligonucleotide
  source 1..19: mol_type = other RNA
tcaccctggacagtcagct

SEQ ID NO: 2300 - RNA, 19 nt, synthetic construct
  misc_feature 1..19: note = Description of Artificial Sequence: Synthetic oligonucleotide
  source 1..19: mol_type = other RNA
caccctggacagtcagctt

SEQ ID NO: 2301 - RNA, 19 nt, synthetic construct
  misc_feature 1..19: note = Description of Artificial Sequence: Synthetic oligonucleotide
  source 1..19: mol_type = other RNA
accctggacagtcagcttg

SEQ ID NO: 2302 - RNA, 19 nt, synthetic construct
  misc_feature 1..19: note = Description of Artificial Sequence: Synthetic oligonucleotide
  source 1..19: mol_type = other RNA
ccctggacagtcagcttgc

SEQ ID NO: 2303 - RNA, 19 nt, synthetic construct
  misc_feature 1..19: note = Description of Artificial Sequence: Synthetic oligonucleotide
  source 1..19: mol_type = other RNA
cctggacagtcagcttgcg

SEQ ID NO: 2304 - RNA, 19 nt, synthetic construct
  misc_feature 1..19: note = Description of Artificial Sequence: Synthetic oligonucleotide
  source 1..19: mol_type = other RNA
ctggacagtcagcttgcgg

SEQ ID NO: 2305 - RNA, 19 nt, synthetic construct
  misc_feature 1..19: note = Description of Artificial Sequence: Synthetic oligonucleotide
  source 1..19: mol_type = other RNA
tggacagtcagcttgcgga

SEQ ID NO: 2306 - RNA, 19 nt, synthetic construct
  misc_feature 1..19: note = Description of Artificial Sequence: Synthetic oligonucleotide
  source 1..19: mol_type = other RNA
ggacagtcagcttgcggaa

SEQ ID NO: 2307 - RNA, 19 nt, synthetic construct
  misc_feature 1..19: note = Description of Artificial Sequence: Synthetic oligonucleotide
  source 1..19: mol_type = other RNA
gacagtcagcttgcggaat

SEQ ID NO: 2308 - RNA, 19 nt, synthetic construct
  misc_feature 1..19: note = Description of Artificial Sequence: Synthetic oligonucleotide
  source 1..19: mol_type = other RNA
acagtcagcttgcggaatc

SEQ ID NO: 2309 - RNA, 19 nt, synthetic construct
  misc_feature 1..19: note = Description of Artificial Sequence: Synthetic oligonucleotide
  source 1..19: mol_type = other RNA
cagtcagcttgcggaatcg

SEQ ID NO: 2310 - RNA, 19 nt, synthetic construct
  misc_feature 1..19: note = Description of Artificial Sequence: Synthetic oligonucleotide
  source 1..19: mol_type = other RNA
agtcagcttgcggaatcgg

SEQ ID NO: 2311 - RNA, 19 nt, synthetic construct
  misc_feature 1..19: note = Description of Artificial Sequence: Synthetic oligonucleotide
  source 1..19: mol_type = other RNA
gtcagcttgcggaatcggc

SEQ ID NO: 2312 - RNA, 19 nt, synthetic construct
  misc_feature 1..19: note = Description of Artificial Sequence: Synthetic oligonucleotide
  source 1..19: mol_type = other RNA
tcagcttgcggaatcggca

SEQ ID NO: 2313 - RNA, 19 nt, synthetic construct
  misc_feature 1..19: note = Description of Artificial Sequence: Synthetic oligonucleotide
  source 1..19: mol_type = other RNA
cagcttgcggaatcggcag

SEQ ID NO: 2314 - RNA, 19 nt, synthetic construct
  misc_feature 1..19: note = Description of Artificial Sequence: Synthetic oligonucleotide
  source 1..19: mol_type = other RNA
agcttgcggaatcggcagg

SEQ ID NO: 2315 - RNA, 19 nt, synthetic construct
  misc_feature 1..19: note = Description of Artificial Sequence: Synthetic oligonucleotide
  source 1..19: mol_type = other RNA
gcttgcggaatcggcaggg

SEQ ID NO: 2316 - RNA, 19 nt, synthetic construct
  misc_feature 1..19: note = Description of Artificial Sequence: Synthetic oligonucleotide
  source 1..19: mol_type = other RNA
cttgcggaatcggcagggc

SEQ ID NO: 2317 - RNA, 19 nt, synthetic construct
  misc_feature 1..19: note = Description of Artificial Sequence: Synthetic oligonucleotide
  source 1..19: mol_type = other RNA
ttgcggaatcggcagggcc

SEQ ID NO: 2318 - RNA, 19 nt, synthetic construct
  misc_feature 1..19: note = Description of Artificial Sequence: Synthetic oligonucleotide
  source 1..19: mol_type = other RNA
tgcggaatcggcagggcca

SEQ ID NO: 2319 - RNA, 19 nt, synthetic construct
  misc_feature 1..19: note = Description of Artificial Sequence: Synthetic oligonucleotide
  source 1..19: mol_type = other RNA
gcggaatcggcagggccag

SEQ ID NO: 2320 - RNA, 19 nt, synthetic construct
  misc_feature 1..19: note = Description of Artificial Sequence: Synthetic oligonucleotide
  source 1..19: mol_type = other RNA
cggaatcggcagggccagc

SEQ ID NO: 2321 - RNA, 19 nt, synthetic construct
  misc_feature 1..19: note = Description of Artificial Sequence: Synthetic oligonucleotide
  source 1..19: mol_type = other RNA
ggaatcggcagggccagca

SEQ ID NO: 2322 - RNA, 19 nt, synthetic construct
  misc_feature 1..19: note = Description of Artificial Sequence: Synthetic oligonucleotide
  source 1..19: mol_type = other RNA
gaatcggcagggccagcat

SEQ ID NO: 2323 - RNA, 19 nt, synthetic construct
  misc_feature 1..19: note = Description of Artificial Sequence: Synthetic oligonucleotide
  source 1..19: mol_type = other RNA
aatcggcagggccagcatt

SEQ ID NO: 2324 - RNA, 19 nt, synthetic construct
  misc_feature 1..19: note = Description of Artificial Sequence: Synthetic oligonucleotide
  source 1..19: mol_type = other RNA
atcggcagggccagcattt

SEQ ID NO: 2325 - RNA, 19 nt, synthetic construct
  misc_feature 1..19: note = Description of Artificial Sequence: Synthetic oligonucleotide
  source 1..19: mol_type = other RNA
tcggcagggccagcatttc

SEQ ID NO: 2326 - RNA, 19 nt, synthetic construct
  misc_feature 1..19: note = Description of Artificial Sequence: Synthetic oligonucleotide
  source 1..19: mol_type = other RNA
cggcagggccagcatttct

SEQ ID NO: 2327 - RNA, 19 nt, synthetic construct
  misc_feature 1..19: note = Description of Artificial Sequence: Synthetic oligonucleotide
  source 1..19: mol_type = other RNA
ggcagggccagcatttctg

SEQ ID NO: 2328 - RNA, 19 nt, synthetic construct
  misc_feature 1..19: note = Description of Artificial Sequence: Synthetic oligonucleotide
  source 1..19: mol_type = other RNA
gcagggccagcatttctgc

SEQ ID NO: 2329 - RNA, 19 nt, synthetic construct
  misc_feature 1..19: note = Description of Artificial Sequence: Synthetic oligonucleotide
  source 1..19: mol_type = other RNA
cagggccagcatttctgcg

SEQ ID NO: 2330 - RNA, 19 nt, synthetic construct
  misc_feature 1..19: note = Description of Artificial Sequence: Synthetic oligonucleotide
  source 1..19: mol_type = other RNA
agggccagcatttctgcgg

SEQ ID NO: 2331 - RNA, 19 nt, synthetic construct
  misc_feature 1..19: note = Description of Artificial Sequence: Synthetic oligonucleotide
  source 1..19: mol_type = other RNA
gggccagcatttctgcggg

SEQ ID NO: 2332 - RNA, 19 nt, synthetic construct
  misc_feature 1..19: note = Description of Artificial Sequence: Synthetic oligonucleotide
  source 1..19: mol_type = other RNA
ggccagcatttctgcgggg

SEQ ID NO: 2333 - RNA, 19 nt, synthetic construct
  misc_feature 1..19: note = Description of Artificial Sequence: Synthetic oligonucleotide
  source 1..19: mol_type = other RNA
gccagcatttctgcggggg

SEQ ID NO: 2334 - RNA, 19 nt, synthetic construct
  misc_feature 1..19: note = Description of Artificial Sequence: Synthetic oligonucleotide
  source 1..19: mol_type = other RNA
ccagcatttctgcgggggg

SEQ ID NO: 2335 - RNA, 19 nt, synthetic construct
  misc_feature 1..19: note = Description of Artificial Sequence: Synthetic oligonucleotide
  source 1..19: mol_type = other RNA
cagcatttctgcggggggt

SEQ ID NO: 2336 - RNA, 19 nt, synthetic construct
  misc_feature 1..19: note = Description of Artificial Sequence: Synthetic oligonucleotide
  source 1..19: mol_type = other RNA
agcatttctgcggggggtc

SEQ ID NO: 2337 - RNA, 19 nt, synthetic construct
  misc_feature 1..19: note = Description of Artificial Sequence: Synthetic oligonucleotide
  source 1..19: mol_type = other RNA
gcatttctgcggggggtct

SEQ ID NO: 2338 - RNA, 19 nt, synthetic construct
  misc_feature 1..19: note = Description of Artificial Sequence: Synthetic oligonucleotide
  source 1..19: mol_type = other RNA
catttctgcggggggtctc

SEQ ID NO: 2339 - RNA, 19 nt, synthetic construct
  misc_feature 1..19: note = Description of Artificial Sequence: Synthetic oligonucleotide
  source 1..19: mol_type = other RNA
atttctgcggggggtctct

SEQ ID NO: 2340 - RNA, 19 nt, synthetic construct
  misc_feature 1..19: note = Description of Artificial Sequence: Synthetic oligonucleotide
  source 1..19: mol_type = other RNA
tttctgcggggggtctcta

SEQ ID NO: 2341 - RNA, 19 nt, synthetic construct
  misc_feature 1..19: note = Description of Artificial Sequence: Synthetic oligonucleotide
  source 1..19: mol_type = other RNA
ttctgcggggggtctctag

SEQ ID NO: 2342 - RNA, 19 nt, synthetic construct
  misc_feature 1..19: note = Description of Artificial Sequence: Synthetic oligonucleotide
  source 1..19: mol_type = other RNA
tctgcggggggtctctagt

SEQ ID NO: 2343 - RNA, 19 nt, synthetic construct
  misc_feature 1..19: note = Description of Artificial Sequence: Synthetic oligonucleotide
  source 1..19: mol_type = other RNA
ctgcggggggtctctagtg

SEQ ID NO: 2344 - RNA, 19 nt, synthetic construct
  misc_feature 1..19: note = Description of Artificial Sequence: Synthetic oligonucleotide
  source 1..19: mol_type = other RNA
tgcggggggtctctagtga

SEQ ID NO: 2345 - RNA, 19 nt, synthetic construct
  misc_feature 1..19: note = Description of Artificial Sequence: Synthetic oligonucleotide
  source 1..19: mol_type = other RNA
gcggggggtctctagtgaa

SEQ ID NO: 2346 - RNA, 19 nt, synthetic construct
  misc_feature 1..19: note = Description of Artificial Sequence: Synthetic oligonucleotide
  source 1..19: mol_type = other RNA
cggggggtctctagtgaag

SEQ ID NO: 2347 - RNA, 19 nt, synthetic construct
  misc_feature 1..19: note = Description of Artificial Sequence: Synthetic oligonucleotide
  source 1..19: mol_type = other RNA
ggggggtctctagtgaagg

SEQ ID NO: 2348 - RNA, 19 nt, synthetic construct
  misc_feature 1..19: note = Description of Artificial Sequence: Synthetic oligonucleotide
  source 1..19: mol_type = other RNA
gggggtctctagtgaagga

SEQ ID NO: 2349 - RNA, 19 nt, synthetic construct
  misc_feature 1..19: note = Description of Artificial Sequence: Synthetic oligonucleotide
  source 1..19: mol_type = other RNA
ggggtctctagtgaaggag

SEQ ID NO: 2350 - RNA, 19 nt, synthetic construct
  misc_feature 1..19: note = Description of Artificial Sequence: Synthetic oligonucleotide
  source 1..19: mol_type = other RNA
gggtctctagtgaaggagc

SEQ ID NO: 2351 - RNA, 19 nt, synthetic construct
  misc_feature 1..19: note = Description of Artificial Sequence: Synthetic oligonucleotide
  source 1..19: mol_type = other RNA
ggtctctagtgaaggagca

SEQ ID NO: 2352 - RNA, 19 nt, synthetic construct
  misc_feature 1..19: note = Description of Artificial Sequence: Synthetic oligonucleotide
  source 1..19: mol_type = other RNA
gtctctagtgaaggagcag

SEQ ID NO: 2353 - RNA, 19 nt, synthetic construct
  misc_feature 1..19: note = Description of Artificial Sequence: Synthetic oligonucleotide
  source 1..19: mol_type = other RNA
tctctagtgaaggagcagt

SEQ ID NO: 2354 - RNA, 19 nt, synthetic construct
  misc_feature 1..19: note = Description of Artificial Sequence: Synthetic oligonucleotide
  source 1..19: mol_type = other RNA
ctctagtgaaggagcagtg

SEQ ID NO: 2355 - RNA, 19 nt, synthetic construct
  misc_feature 1..19: note = Description of Artificial Sequence: Synthetic oligonucleotide
  source 1..19: mol_type = other RNA
tctagtgaaggagcagtgg

SEQ ID NO: 2356 - RNA, 19 nt, synthetic construct
  misc_feature 1..19: note = Description of Artificial Sequence: Synthetic oligonucleotide
  source 1..19: mol_type = other RNA
ctagtgaaggagcagtgga

SEQ ID NO: 2357 - RNA, 19 nt, synthetic construct
  misc_feature 1..19: note = Description of Artificial Sequence: Synthetic oligonucleotide
  source 1..19: mol_type = other RNA
tagtgaaggagcagtggat

SEQ ID NO: 2358 - RNA, 19 nt, synthetic construct
  misc_feature 1..19: note = Description of Artificial Sequence: Synthetic oligonucleotide
  source 1..19: mol_type = other RNA
agtgaaggagcagtggata

SEQ ID NO: 2359 - RNA, 19 nt, synthetic construct
  misc_feature 1..19: note = Description of Artificial Sequence: Synthetic oligonucleotide
  source 1..19: mol_type = other RNA
gtgaaggagcagtggatac

SEQ ID NO: 2360 - RNA, 19 nt, synthetic construct
  misc_feature 1..19: note = Description of Artificial Sequence: Synthetic oligonucleotide
  source 1..19: mol_type = other RNA
tgaaggagcagtggatact

SEQ ID NO: 2361 - RNA, 19 nt, synthetic construct
  misc_feature 1..19: note = Description of Artificial Sequence: Synthetic oligonucleotide
  source 1..19: mol_type = other RNA
gaaggagcagtggatactg

SEQ ID NO: 2362 - RNA, 19 nt, synthetic construct
  misc_feature 1..19: note = Description of Artificial Sequence: Synthetic oligonucleotide
  source 1..19: mol_type = other RNA
aaggagcagtggatactga

SEQ ID NO: 2363 - RNA, 19 nt, synthetic construct
  misc_feature 1..19: note = Description of Artificial Sequence: Synthetic oligonucleotide
  source 1..19: mol_type = other RNA
aggagcagtggatactgac

SEQ ID NO: 2364 - RNA, 19 nt, synthetic construct
  misc_feature 1..19: note = Description of Artificial Sequence: Synthetic oligonucleotide
  source 1..19: mol_type = other RNA
ggagcagtggatactgact

SEQ ID NO: 2365 - RNA, 19 nt, synthetic construct
  misc_feature 1..19: note = Description of Artificial Sequence: Synthetic oligonucleotide
  source 1..19: mol_type = other RNA
gagcagtggatactgactg

SEQ ID NO: 2366 - RNA, 19 nt, synthetic construct
  misc_feature 1..19: note = Description of Artificial Sequence: Synthetic oligonucleotide
  source 1..19: mol_type = other RNA
agcagtggatactgactgc

SEQ ID NO: 2367 - RNA, 19 nt, synthetic construct
  misc_feature 1..19: note = Description of Artificial Sequence: Synthetic oligonucleotide
  source 1..19: mol_type = other RNA
gcagtggatactgactgcc

SEQ ID NO: 2368 - RNA, 19 nt, synthetic construct
  misc_feature 1..19: note = Description of Artificial Sequence: Synthetic oligonucleotide
  source 1..19: mol_type = other RNA
cagtggatactgactgccc

SEQ ID NO: 2369 - RNA, 19 nt, synthetic construct
  misc_feature 1..19: note = Description of Artificial Sequence: Synthetic oligonucleotide
  source 1..19: mol_type = other RNA
agtggatactgactgcccg

SEQ ID NO: 2370 - RNA, 19 nt, synthetic construct
  misc_feature 1..19: note = Description of Artificial Sequence: Synthetic oligonucleotide
  source 1..19: mol_type = other RNA
gtggatactgactgcccgg

SEQ ID NO: 2371 - RNA, 19 nt, synthetic construct
  misc_feature 1..19: note = Description of Artificial Sequence: Synthetic oligonucleotide
  source 1..19: mol_type = other RNA
tggatactgactgcccggc

SEQ ID NO: 2372 - RNA, 19 nt, synthetic construct
  misc_feature 1..19: note = Description of Artificial Sequence: Synthetic oligonucleotide
  source 1..19: mol_type = other RNA
ggatactgactgcccggca

SEQ ID NO: 2373 - RNA, 19 nt, synthetic construct
  misc_feature 1..19: note = Description of Artificial Sequence: Synthetic oligonucleotide
  source 1..19: mol_type = other RNA
gatactgactgcccggcag

SEQ ID NO: 2374 - RNA, 19 nt, synthetic construct
  misc_feature 1..19: note = Description of Artificial Sequence: Synthetic oligonucleotide
  source 1..19: mol_type = other RNA
atactgactgcccggcagt

SEQ ID NO: 2375 - RNA, 19 nt, synthetic construct
  misc_feature 1..19: note = Description of Artificial Sequence: Synthetic oligonucleotide
  source 1..19: mol_type = other RNA
tactgactgcccggcagtg

SEQ ID NO: 2376 - RNA, 19 nt, synthetic construct
  misc_feature 1..19: note = Description of Artificial Sequence: Synthetic oligonucleotide
  source 1..19: mol_type = other RNA
actgactgcccggcagtgc

SEQ ID NO: 2377 - RNA, 19 nt, synthetic construct
  misc_feature 1..19: note = Description of Artificial Sequence: Synthetic oligonucleotide
  source 1..19: mol_type = other RNA
ctgactgcccggcagtgct

SEQ ID NO: 2378 - RNA, 19 nt, synthetic construct
  misc_feature 1..19: note = Description of Artificial Sequence: Synthetic oligonucleotide
  source 1..19: mol_type = other RNA
tgactgcccggcagtgctt

SEQ ID NO: 2379 - RNA, 19 nt, synthetic construct
  misc_feature 1..19: note = Description of Artificial Sequence: Synthetic oligonucleotide
  source 1..19: mol_type = other RNA
gactgcccggcagtgcttc

SEQ ID NO: 2380 - RNA, 19 nt, synthetic construct
  misc_feature 1..19: note = Description of Artificial Sequence: Synthetic oligonucleotide
  source 1..19: mol_type = other RNA
actgcccggcagtgcttct

SEQ ID NO: 2381 - RNA, 19 nt, synthetic construct
  misc_feature 1..19: note = Description of Artificial Sequence: Synthetic oligonucleotide
  source 1..19: mol_type = other RNA
ctgcccggcagtgcttctc

SEQ ID NO: 2382 - RNA, 19 nt, synthetic construct
  misc_feature 1..19: note = Description of Artificial Sequence: Synthetic oligonucleotide
  source 1..19: mol_type = other RNA
tgcccggcagtgcttctcc

SEQ ID NO: 2383 - RNA, 19 nt, synthetic construct
  misc_feature 1..19: note = Description of Artificial Sequence: Synthetic oligonucleotide
  source 1..19: mol_type = other RNA
gcccggcagtgcttctcct

SEQ ID NO: 2384 - RNA, 19 nt, synthetic construct
  misc_feature 1..19: note = Description of Artificial Sequence: Synthetic oligonucleotide
  source 1..19: mol_type = other RNA
cccggcagtgcttctcctc

SEQ ID NO: 2385 - RNA, 19 nt, synthetic construct
  misc_feature 1..19: note = Description of Artificial Sequence: Synthetic oligonucleotide
  source 1..19: mol_type = other RNA
ccggcagtgcttctcctcc

SEQ ID NO: 2386 - RNA, 19 nt, synthetic construct
  misc_feature 1..19: note = Description of Artificial Sequence: Synthetic oligonucleotide
  source 1..19: mol_type = other RNA
cggcagtgcttctcctcct

SEQ ID NO: 2387 - RNA, 19 nt, synthetic construct
  misc_feature 1..19: note = Description of Artificial Sequence: Synthetic oligonucleotide
  source 1..19: mol_type = other RNA
ggcagtgcttctcctcctg

SEQ ID NO: 2388 - RNA, 19 nt, synthetic construct
  misc_feature 1..19: note = Description of Artificial Sequence: Synthetic oligonucleotide
  source 1..19: mol_type = other RNA
gcagtgcttctcctcctgc

SEQ ID NO: 2389 - RNA, 19 nt, synthetic construct
  misc_feature 1..19: note = Description of Artificial Sequence: Synthetic oligonucleotide
  source 1..19: mol_type = other RNA
cagtgcttctcctcctgcc

SEQ ID NO: 2390 - RNA, 19 nt, synthetic construct
  misc_feature 1..19: note = Description of Artificial Sequence: Synthetic oligonucleotide
  source 1..19: mol_type = other RNA
agtgcttctcctcctgcca

SEQ ID NO: 2391 - RNA, 19 nt, synthetic construct
  misc_feature 1..19: note = Description of Artificial Sequence: Synthetic oligonucleotide
  source 1..19: mol_type = other RNA
gtgcttctcctcctgccat

SEQ ID NO: 2392 - RNA, 19 nt, synthetic construct
  misc_feature 1..19: note = Description of Artificial Sequence: Synthetic oligonucleotide
  source 1..19: mol_type = other RNA
tgcttctcctcctgccata

SEQ ID NO: 2393 - RNA, 19 nt, synthetic construct
  misc_feature 1..19: note = Description of Artificial Sequence: Synthetic oligonucleotide
  source 1..19: mol_type = other RNA
gcttctcctcctgccatat

SEQ ID NO: 2394 - RNA, 19 nt, synthetic construct
  misc_feature 1..19: note = Description of Artificial Sequence: Synthetic oligonucleotide
  source 1..19: mol_type = other RNA
cttctcctcctgccatatg

SEQ ID NO: 2395 - RNA, 19 nt, synthetic construct
  misc_feature 1..19: note = Description of Artificial Sequence: Synthetic oligonucleotide
  source 1..19: mol_type = other RNA
ttctcctcctgccatatgc

SEQ ID NO: 2396 - RNA, 19 nt, synthetic construct
  misc_feature 1..19: note = Description of Artificial Sequence: Synthetic oligonucleotide
  source 1..19: mol_type = other RNA
tctcctcctgccatatgcc

SEQ ID NO: 2397 - RNA, 19 nt, synthetic construct
  misc_feature 1..19: note = Description of Artificial Sequence: Synthetic oligonucleotide
  source 1..19: mol_type = other RNA
ctcctcctgccatatgcct

SEQ ID NO: 2398 - RNA, 19 nt, synthetic construct
  misc_feature 1..19: note = Description of Artificial Sequence: Synthetic oligonucleotide
  source 1..19: mol_type = other RNA
tcctcctgccatatgcctc

SEQ ID NO: 2399 - RNA, 19 nt, synthetic construct
  misc_feature 1..19: note = Description of Artificial Sequence: Synthetic oligonucleotide
  source 1..19: mol_type = other RNA
cctcctgccatatgcctct

SEQ ID NO: 2400 - RNA, 19 nt, synthetic construct
  misc_feature 1..19: note = Description of Artificial Sequence: Synthetic oligonucleotide
  source 1..19: mol_type = other RNA
ctcctgccatatgcctctc

SEQ ID NO: 2401 - RNA, 19 nt, synthetic construct
  misc_feature 1..19: note = Description of Artificial Sequence: Synthetic oligonucleotide
  source 1..19: mol_type = other RNA
tcctgccatatgcctctca

SEQ ID NO: 2402 - RNA, 19 nt, synthetic construct
  misc_feature 1..19: note = Description of Artificial Sequence: Synthetic oligonucleotide
  source 1..19: mol_type = other RNA
cctgccatatgcctctcac

SEQ ID NO: 2403 - RNA, 19 nt, synthetic construct
  misc_feature 1..19: note = Description of Artificial Sequence: Synthetic oligonucleotide
  source 1..19: mol_type = other RNA
ctgccatatgcctctcacg

SEQ ID NO: 2404 - RNA, 19 nt, synthetic construct
  misc_feature 1..19: note = Description of Artificial Sequence: Synthetic oligonucleotide
  source 1..19: mol_type = other RNA
tgccatatgcctctcacgg

SEQ ID NO: 2405 - RNA, 19 nt, synthetic construct
  misc_feature 1..19: note = Description of Artificial Sequence: Synthetic oligonucleotide
  source 1..19: mol_type = other RNA
gccatatgcctctcacggg

SEQ ID NO: 2406 - RNA, 19 nt, synthetic construct
  misc_feature 1..19: note = Description of Artificial Sequence: Synthetic oligonucleotide
  source 1..19: mol_type = other RNA
ccatatgcctctcacgggc

SEQ ID NO: 2407 - RNA, 19 nt, synthetic construct
  misc_feature 1..19: note = Description of Artificial Sequence: Synthetic oligonucleotide
  source 1..19: mol_type = other RNA
catatgcctctcacgggct

SEQ ID NO: 2408 - RNA, 19 nt, synthetic construct
  misc_feature 1..19: note = Description of Artificial Sequence: Synthetic oligonucleotide
  source 1..19: mol_type = other RNA
atatgcctctcacgggcta

SEQ ID NO: 2409 - RNA, 19 nt, synthetic construct
  misc_feature 1..19: note = Description of Artificial Sequence: Synthetic oligonucleotide
  source 1..19: mol_type = other RNA
tatgcctctcacgggctat

SEQ ID NO: 2410 - RNA, 19 nt, synthetic construct
  misc_feature 1..19: note = Description of Artificial Sequence: Synthetic oligonucleotide
  source 1..19: mol_type = other RNA
atgcctctcacgggctatg

SEQ ID NO: 2411 - RNA, 19 nt, synthetic construct
  misc_feature 1..19: note = Description of Artificial Sequence: Synthetic oligonucleotide
  source 1..19: mol_type = other RNA
tgcctctcacgggctatga

SEQ ID NO: 2412 - RNA, 19 nt, synthetic construct
  misc_feature 1..19: note = Description of Artificial Sequence: Synthetic oligonucleotide
  source 1..19: mol_type = other RNA
gcctctcacgggctatgag

SEQ ID NO: 2413 - RNA, 19 nt, synthetic construct
  misc_feature 1..19: note = Description of Artificial Sequence: Synthetic oligonucleotide
  source 1..19: mol_type = other RNA
cctctcacgggctatgagg

SEQ ID NO: 2414 - RNA, 19 nt, synthetic construct
  misc_feature 1..19: note = Description of Artificial Sequence: Synthetic oligonucleotide
  source 1..19: mol_type = other RNA
ctctcacgggctatgaggt

SEQ ID NO: 2415 - RNA, 19 nt, synthetic construct
  misc_feature 1..19: note = Description of Artificial Sequence: Synthetic oligonucleotide
  source 1..19: mol_type = other RNA
tctcacgggctatgaggta

SEQ ID NO: 2416 - RNA, 19 nt, synthetic construct
  misc_feature 1..19: note = Description of Artificial Sequence: Synthetic oligonucleotide
  source 1..19: mol_type = other RNA
ctcacgggctatgaggtat

SEQ ID NO: 2417 - RNA, 19 nt, synthetic construct
  misc_feature 1..19: note = Description of Artificial Sequence: Synthetic oligonucleotide
  source 1..19: mol_type = other RNA
tcacgggctatgaggtatg

SEQ ID NO: 2418 - RNA, 19 nt, synthetic construct
  misc_feature 1..19: note = Description of Artificial Sequence: Synthetic oligonucleotide
  source 1..19: mol_type = other RNA
cacgggctatgaggtatgg

SEQ ID NO: 2419 - RNA, 19 nt, synthetic construct
  misc_feature 1..19: note = Description of Artificial Sequence: Synthetic oligonucleotide
  source 1..19: mol_type = other RNA
acgggctatgaggtatggt

SEQ ID NO: 2420 - RNA, 19 nt, synthetic construct
  misc_feature 1..19: note = Description of Artificial Sequence: Synthetic oligonucleotide
  source 1..19: mol_type = other RNA
cgggctatgaggtatggtt

SEQ ID NO: 2421 - RNA, 19 nt, synthetic construct
  misc_feature 1..19: note = Description of Artificial Sequence: Synthetic oligonucleotide
  source 1..19: mol_type = other RNA
gggctatgaggtatggttg

SEQ ID NO: 2422 - RNA, 19 nt, synthetic construct
  misc_feature 1..19: note = Description of Artificial Sequence: Synthetic oligonucleotide
  source 1..19: mol_type = other RNA
ggctatgaggtatggttgg

SEQ ID NO: 2423 - RNA, 19 nt, synthetic construct
  misc_feature 1..19: note = Description of Artificial Sequence: Synthetic oligonucleotide
  source 1..19: mol_type = other RNA
gctatgaggtatggttggg

SEQ ID NO: 2424 - RNA, 19 nt, synthetic construct
  misc_feature 1..19: note = Description of Artificial Sequence: Synthetic oligonucleotide
  source 1..19: mol_type = other RNA
ctatgaggtatggttgggc

SEQ ID NO: 2425 - RNA, 19 nt, synthetic construct
  misc_feature 1..19: note = Description of Artificial Sequence: Synthetic oligonucleotide
  source 1..19: mol_type = other RNA
tatgaggtatggttgggca

SEQ ID NO: 2426 - RNA, 19 nt, synthetic construct
  misc_feature 1..19: note = Description of Artificial Sequence: Synthetic oligonucleotide
  source 1..19: mol_type = other RNA
atgaggtatggttgggcac

SEQ ID NO: 2427 - RNA, 19 nt, synthetic construct
  misc_feature 1..19: note = Description of Artificial Sequence: Synthetic oligonucleotide
  source 1..19: mol_type = other RNA
tgaggtatggttgggcacc

SEQ ID NO: 2428 - RNA, 19 nt, synthetic construct
  misc_feature 1..19: note = Description of Artificial Sequence: Synthetic oligonucleotide
  source 1..19: mol_type = other RNA
gaggtatggttgggcaccc

SEQ ID NO: 2429 - RNA, 19 nt, synthetic construct
  misc_feature 1..19: note = Description of Artificial Sequence: Synthetic oligonucleotide
  source 1..19: mol_type = other RNA
aggtatggttgggcaccct

SEQ ID NO: 2430 - RNA, 19 nt, synthetic construct
  misc_feature 1..19: note = Description of Artificial Sequence: Synthetic oligonucleotide
  source 1..19: mol_type = other RNA
ggtatggttgggcaccctg

SEQ ID NO: 2431 - RNA, 19 nt, synthetic construct
  misc_feature 1..19: note = Description of Artificial Sequence: Synthetic oligonucleotide
  source 1..19: mol_type = other RNA
gtatggttgggcaccctgt

SEQ ID NO: 2432 - RNA, 19 nt, synthetic construct
  misc_feature 1..19: note = Description of Artificial Sequence: Synthetic oligonucleotide
  source 1..19: mol_type = other RNA
tatggttgggcaccctgtt

SEQ ID NO: 2433 - RNA, 19 nt, synthetic construct
  misc_feature 1..19: note = Description of Artificial Sequence: Synthetic oligonucleotide
  source 1..19: mol_type = other RNA
atggttgggcaccctgttc

SEQ ID NO: 2434 - RNA, 19 nt, synthetic construct
  misc_feature 1..19: note = Description of Artificial Sequence: Synthetic oligonucleotide
  source 1..19: mol_type = other RNA
tggttgggcaccctgttcc

SEQ ID NO: 2435 - RNA, 19 nt, synthetic construct
  misc_feature 1..19: note = Description of Artificial Sequence: Synthetic oligonucleotide
  source 1..19: mol_type = other RNA
ggttgggcaccctgttcca

SEQ ID NO: 2436 - RNA, 19 nt, synthetic construct
  misc_feature 1..19: note = Description of Artificial Sequence: Synthetic oligonucleotide
  source 1..19: mol_type = other RNA
gttgggcaccctgttccag

SEQ ID NO: 2437 - RNA, 19 nt, synthetic construct
  misc_feature 1..19: note = Description of Artificial Sequence: Synthetic oligonucleotide
  source 1..19: mol_type = other RNA
ttgggcaccctgttccaga

SEQ ID NO: 2438 - RNA, 19 nt, synthetic construct
  misc_feature 1..19: note = Description of Artificial Sequence: Synthetic oligonucleotide
  source 1..19: mol_type = other RNA
tgggcaccctgttccagaa

SEQ ID NO: 2439 - RNA, 19 nt, synthetic construct
  misc_feature 1..19: note = Description of Artificial Sequence: Synthetic oligonucleotide
  source 1..19: mol_type = other RNA
gggcaccctgttccagaac

SEQ ID NO: 2440 - RNA, 19 nt, synthetic construct
  misc_feature 1..19: note = Description of Artificial Sequence: Synthetic oligonucleotide
  source 1..19: mol_type = other RNA
ggcaccctgttccagaacc

SEQ ID NO: 2441 - RNA, 19 nt, synthetic construct
  misc_feature 1..19: note = Description of Artificial Sequence: Synthetic oligonucleotide
  source 1..19: mol_type = other RNA
gcaccctgttccagaaccc

SEQ ID NO: 2442 - RNA, 19 nt, synthetic construct
  misc_feature 1..19: note = Description of Artificial Sequence: Synthetic oligonucleotide
  source 1..19: mol_type = other RNA
caccctgttccagaaccca

SEQ ID NO: 2443 - RNA, 19 nt, synthetic construct
  misc_feature 1..19: note = Description of Artificial Sequence: Synthetic oligonucleotide
  source 1..19: mol_type = other RNA
accctgttccagaacccac

SEQ ID NO: 2444 - RNA, 19 nt, synthetic construct
  misc_feature 1..19: note = Description of Artificial Sequence: Synthetic oligonucleotide
  source 1..19: mol_type = other RNA
ccctgttccagaacccaca

SEQ ID NO: 2445 - RNA, 19 nt, synthetic construct
  misc_feature 1..19: note = Description of Artificial Sequence: Synthetic oligonucleotide
  source 1..19: mol_type = other RNA
cctgttccagaacccacag

SEQ ID NO: 2446 - RNA, 19 nt, synthetic construct
  misc_feature 1..19: note = Description of Artificial Sequence: Synthetic oligonucleotide
  source 1..19: mol_type = other RNA
ctgttccagaacccacagc

SEQ ID NO: 2447 - RNA, 19 nt, synthetic construct
  misc_feature 1..19: note = Description of Artificial Sequence: Synthetic oligonucleotide
  source 1..19: mol_type = other RNA
tgttccagaacccacagca

SEQ ID NO: 2448 - RNA, 19 nt, synthetic construct
  misc_feature 1..19: note = Description of Artificial Sequence: Synthetic oligonucleotide
  source 1..19: mol_type = other RNA
gttccagaacccacagcat

SEQ ID NO: 2449 - RNA, 19 nt, synthetic construct
  misc_feature 1..19: note = Description of Artificial Sequence: Synthetic oligonucleotide
  source 1..19: mol_type = other RNA
ttccagaacccacagcatg

SEQ ID NO: 2450 - RNA, 19 nt, synthetic construct
  misc_feature 1..19: note = Description of Artificial Sequence: Synthetic oligonucleotide
  source 1..19: mol_type = other RNA
tccagaacccacagcatgg

SEQ ID NO: 2451 - RNA, 19 nt, synthetic construct
  misc_feature 1..19: note = Description of Artificial Sequence: Synthetic oligonucleotide
  source 1..19: mol_type = other RNA
ccagaacccacagcatgga

SEQ ID NO: 2452 - RNA, 19 nt, synthetic construct
  misc_feature 1..19: note = Description of Artificial Sequence: Synthetic oligonucleotide
  source 1..19: mol_type = other RNA
cagaacccacagcatggag

SEQ ID NO: 2453 - RNA, 19 nt, synthetic construct
  misc_feature 1..19: note = Description of Artificial Sequence: Synthetic oligonucleotide
  source 1..19: mol_type = other RNA
agaacccacagcatggaga

SEQ ID NO: 2454 - RNA, 19 nt, synthetic construct
  misc_feature 1..19: note = Description of Artificial Sequence: Synthetic oligonucleotide
  source 1..19: mol_type = other RNA
gaacccacagcatggagag

SEQ ID NO: 2455 - RNA, 19 nt, synthetic construct
  misc_feature 1..19: note = Description of Artificial Sequence: Synthetic oligonucleotide
  source 1..19: mol_type = other RNA
aacccacagcatggagagc

SEQ ID NO: 2456 - RNA, 19 nt, synthetic construct
  misc_feature 1..19: note = Description of Artificial Sequence: Synthetic oligonucleotide
  source 1..19: mol_type = other RNA
acccacagcatggagagcc

SEQ ID NO: 2457 - RNA, 19 nt, synthetic construct
  misc_feature 1..19: note = Description of Artificial Sequence: Synthetic oligonucleotide
  source 1..19: mol_type = other RNA
cccacagcatggagagcca

SEQ ID NO: 2458 - RNA, 19 nt, synthetic construct
  misc_feature 1..19: note = Description of Artificial Sequence: Synthetic oligonucleotide
  source 1..19: mol_type = other RNA
ccacagcatggagagccaa

SEQ ID NO: 2459 - RNA, 19 nt, synthetic construct
  misc_feature 1..19: note = Description of Artificial Sequence: Synthetic oligonucleotide
  source 1..19: mol_type = other RNA
cacagcatggagagccaag

SEQ ID NO: 2460 - RNA, 19 nt, synthetic construct
  misc_feature 1..19: note = Description of Artificial Sequence: Synthetic oligonucleotide
  source 1..19: mol_type = other RNA
acagcatggagagccaagc

SEQ ID NO: 2461 - RNA, 19 nt, synthetic construct
  misc_feature 1..19: note = Description of Artificial Sequence: Synthetic oligonucleotide
  source 1..19: mol_type = other RNA
cagcatggagagccaagcc

SEQ ID NO: 2462 - RNA, 19 nt, synthetic construct
  misc_feature 1..19: note = Description of Artificial Sequence: Synthetic oligonucleotide
  source 1..19: mol_type = other RNA
agcatggagagccaagcct

SEQ ID NO: 2463 - RNA, 19 nt, synthetic construct
  misc_feature 1..19: note = Description of Artificial Sequence: Synthetic oligonucleotide
  source 1..19: mol_type = other RNA
gcatggagagccaagccta

SEQ ID NO: 2464 - RNA, 19 nt, synthetic construct
  misc_feature 1..19: note = Description of Artificial Sequence: Synthetic oligonucleotide
  source 1..19: mol_type = other RNA
catggagagccaagcctac

SEQ ID NO: 2465 - RNA, 19 nt, synthetic construct
  misc_feature 1..19: note = Description of Artificial Sequence: Synthetic oligonucleotide
  source 1..19: mol_type = other RNA
atggagagccaagcctaca

SEQ ID NO: 2466 - RNA, 19 nt, synthetic construct
  misc_feature 1..19: note = Description of Artificial Sequence: Synthetic oligonucleotide
  source 1..19: mol_type = other RNA
tggagagccaagcctacag

SEQ ID NO: 2467 - RNA, 19 nt, synthetic construct
  misc_feature 1..19: note = Description of Artificial Sequence: Synthetic oligonucleotide
  source 1..19: mol_type = other RNA
ggagagccaagcctacagc

SEQ ID NO: 2468 - RNA, 19 nt, synthetic construct
  misc_feature 1..19: note = Description of Artificial Sequence: Synthetic oligonucleotide
  source 1..19: mol_type = other RNA
gagagccaagcctacagcg

SEQ ID NO: 2469 - RNA, 19 nt, synthetic construct
  misc_feature 1..19: note = Description of Artificial Sequence: Synthetic oligonucleotide
  source 1..19: mol_type = other RNA
agagccaagcctacagcgg

SEQ ID NO: 2470 - RNA, 19 nt, synthetic construct
  misc_feature 1..19: note = Description of Artificial Sequence: Synthetic oligonucleotide
  source 1..19: mol_type = other RNA
gagccaagcctacagcggg

SEQ ID NO: 2471 - RNA, 19 nt, synthetic construct
  misc_feature 1..19: note = Description of Artificial Sequence: Synthetic oligonucleotide
  source 1..19: mol_type = other RNA
agccaagcctacagcgggt

SEQ ID NO: 2472 - RNA, 19 nt, synthetic construct
  misc_feature 1..19: note = Description of Artificial Sequence: Synthetic oligonucleotide
  source 1..19: mol_type = other RNA
gccaagcctacagcgggtc

SEQ ID NO: 2473 - RNA, 19 nt, synthetic construct
  misc_feature 1..19: note = Description of Artificial Sequence: Synthetic oligonucleotide
  source 1..19: mol_type = other RNA
ccaagcctacagcgggtcc

SEQ ID NO: 2474 - RNA, 19 nt, synthetic construct
  misc_feature 1..19: note = Description of Artificial Sequence: Synthetic oligonucleotide
  source 1..19: mol_type = other RNA
caagcctacagcgggtccc

SEQ ID NO: 2475 - RNA, 19 nt, synthetic construct
  misc_feature 1..19: note = Description of Artificial Sequence: Synthetic oligonucleotide
  source 1..19: mol_type = other RNA
aagcctacagcgggtccca

SEQ ID NO: 2476 - RNA, 19 nt, synthetic construct
  misc_feature 1..19: note = Description of Artificial Sequence: Synthetic oligonucleotide
  source 1..19: mol_type = other RNA
agcctacagcgggtcccag

SEQ ID NO: 2477 - RNA, 19 nt, synthetic construct
  misc_feature 1..19: note = Description of Artificial Sequence: Synthetic oligonucleotide
  source 1..19: mol_type = other RNA
gcctacagcgggtcccagt

SEQ ID NO: 2478 - RNA, 19 nt, synthetic construct
  misc_feature 1..19: note = Description of Artificial Sequence: Synthetic oligonucleotide
  source 1..19: mol_type = other RNA
cctacagcgggtcccagta

SEQ ID NO: 2479 - RNA, 19 nt, synthetic construct
  misc_feature 1..19: note = Description of Artificial Sequence: Synthetic oligonucleotide
  source 1..19: mol_type = other RNA
ctacagcgggtcccagtag

SEQ ID NO: 2480 - RNA, 19 nt, synthetic construct
  misc_feature 1..19: note = Description of Artificial Sequence: Synthetic oligonucleotide
  source 1..19: mol_type = other RNA
tacagcgggtcccagtagc

SEQ ID NO: 2481 - RNA, 19 nt, synthetic construct
  misc_feature 1..19: note = Description of Artificial Sequence: Synthetic oligonucleotide
  source 1..19: mol_type = other RNA
acagcgggtcccagtagcc

SEQ ID NO: 2482 - RNA, 19 nt, synthetic construct
  misc_feature 1..19: note = Description of Artificial Sequence: Synthetic oligonucleotide
  source 1..19: mol_type = other RNA
cagcgggtcccagtagcca

SEQ ID NO: 2483 - RNA, 19 nt, synthetic construct
  misc_feature 1..19: note = Description of Artificial Sequence: Synthetic oligonucleotide
  source 1..19: mol_type = other RNA
agcgggtcccagtagccaa

SEQ ID NO: 2484 - RNA, 19 nt, synthetic construct
  misc_feature 1..19: note = Description of Artificial Sequence: Synthetic oligonucleotide
  source 1..19: mol_type = other RNA
gcgggtcccagtagccaag

SEQ ID NO: 2485 - RNA, 19 nt, synthetic construct
  misc_feature 1..19: note = Description of Artificial Sequence: Synthetic oligonucleotide
  source 1..19: mol_type = other RNA
cgggtcccagtagccaaga

SEQ ID NO: 2486 - RNA, 19 nt, synthetic construct
  misc_feature 1..19: note = Description of Artificial Sequence: Synthetic oligonucleotide
  source 1..19: mol_type = other RNA
gggtcccagtagccaagat

SEQ ID NO: 2487 - RNA, 19 nt, synthetic construct
  misc_feature 1..19: note = Description of Artificial Sequence: Synthetic oligonucleotide
  source 1..19: mol_type = other RNA
ggtcccagtagccaagatg

SEQ ID NO: 2488 - RNA, 19 nt, synthetic construct
  misc_feature 1..19: note = Description of Artificial Sequence: Synthetic oligonucleotide
  source 1..19: mol_type = other RNA
gtcccagtagccaagatgg

SEQ ID NO: 2489 - RNA, 19 nt, synthetic construct
  misc_feature 1..19: note = Description of Artificial Sequence: Synthetic oligonucleotide
  source 1..19: mol_type = other RNA
tcccagtagccaagatggt

SEQ ID NO: 2490 - RNA, 19 nt, synthetic construct
  misc_feature 1..19: note = Description of Artificial Sequence: Synthetic oligonucleotide
  source 1..19: mol_type = other RNA
cccagtagccaagatggtg

SEQ ID NO: 2491 - RNA, 19 nt, synthetic construct
  misc_feature 1..19: note = Description of Artificial Sequence: Synthetic oligonucleotide
  source 1..19: mol_type = other RNA
ccagtagccaagatggtgt

SEQ ID NO: 2492 - RNA, 19 nt, synthetic construct
  misc_feature 1..19: note = Description of Artificial Sequence: Synthetic oligonucleotide
  source 1..19: mol_type = other RNA
cagtagccaagatggtgtg

SEQ ID NO: 2493 - RNA, 19 nt, synthetic construct
  misc_feature 1..19: note = Description of Artificial Sequence: Synthetic oligonucleotide
  source 1..19: mol_type = other RNA
agtagccaagatggtgtgt

SEQ ID NO: 2494 - RNA, 19 nt, synthetic construct
  misc_feature 1..19: note = Description of Artificial Sequence: Synthetic oligonucleotide
  source 1..19: mol_type = other RNA
gtagccaagatggtgtgtg

SEQ ID NO: 2495 - RNA, 19 nt, synthetic construct
  misc_feature 1..19: note = Description of Artificial Sequence: Synthetic oligonucleotide
  source 1..19: mol_type = other RNA
tagccaagatggtgtgtgg

SEQ ID NO: 2496 - RNA, 19 nt, synthetic construct
  misc_feature 1..19: note = Description of Artificial Sequence: Synthetic oligonucleotide
  source 1..19: mol_type = other RNA
agccaagatggtgtgtggg

SEQ ID NO: 2497 - RNA, 19 nt, synthetic construct
  misc_feature 1..19: note = Description of Artificial Sequence: Synthetic oligonucleotide
  source 1..19: mol_type = other RNA
gccaagatggtgtgtgggc

SEQ ID NO: 2498 - RNA, 19 nt, synthetic construct
  misc_feature 1..19: note = Description of Artificial Sequence: Synthetic oligonucleotide
  source 1..19: mol_type = other RNA
ccaagatggtgtgtgggcc

SEQ ID NO: 2499 - RNA, 19 nt, synthetic construct
  misc_feature 1..19: note = Description of Artificial Sequence: Synthetic oligonucleotide
  source 1..19: mol_type = other RNA
caagatggtgtgtgggccc

SEQ ID NO: 2500 - RNA, 19 nt, synthetic construct
  misc_feature 1..19: note = Description of Artificial Sequence: Synthetic oligonucleotide
  source 1..19: mol_type = other RNA
aagatggtgtgtgggccct

SEQ ID NO: 2501 - RNA, 19 nt, synthetic construct
  misc_feature 1..19: note = Description of Artificial Sequence: Synthetic oligonucleotide
  source 1..19: mol_type = other RNA
agatggtgtgtgggccctc

SEQ ID NO: 2502 - RNA, 19 nt, synthetic construct
  misc_feature 1..19: note = Description of Artificial Sequence: Synthetic oligonucleotide
  source 1..19: mol_type = other RNA
gatggtgtgtgggccctca

SEQ ID NO: 2503 - RNA, 19 nt, synthetic construct
  misc_feature 1..19: note = Description of Artificial Sequence: Synthetic oligonucleotide
  source 1..19: mol_type = other RNA
atggtgtgtgggccctcag

SEQ ID NO: 2504 - RNA, 19 nt, synthetic construct
  misc_feature 1..19: note = Description of Artificial Sequence: Synthetic oligonucleotide
  source 1..19: mol_type = other RNA
tggtgtgtgggccctcagg

SEQ ID NO: 2505 - RNA, 19 nt, synthetic construct
  misc_feature 1..19: note = Description of Artificial Sequence: Synthetic oligonucleotide
  source 1..19: mol_type = other RNA
ggtgtgtgggccctcaggc

SEQ ID NO: 2506 - RNA, 19 nt, synthetic construct
  misc_feature 1..19: note = Description of Artificial Sequence: Synthetic oligonucleotide
  source 1..19: mol_type = other RNA
gtgtgtgggccctcaggct

SEQ ID NO: 2507 - RNA, 19 nt, synthetic construct
  misc_feature 1..19: note = Description of Artificial Sequence: Synthetic oligonucleotide
  source 1..19: mol_type = other RNA
tgtgtgggccctcaggctc

SEQ ID NO: 2508 - RNA, 19 nt, synthetic construct
  misc_feature 1..19: note = Description of Artificial Sequence: Synthetic oligonucleotide
  source 1..19: mol_type = other RNA
gtgtgggccctcaggctcc

SEQ ID NO: 2509 - RNA, 19 nt, synthetic construct
  misc_feature 1..19: note = Description of Artificial Sequence: Synthetic oligonucleotide
  source 1..19: mol_type = other RNA
tgtgggccctcaggctccc

SEQ ID NO: 2510 - RNA, 19 nt, synthetic construct
  misc_feature 1..19: note = Description of Artificial Sequence: Synthetic oligonucleotide
  source 1..19: mol_type = other RNA
gtgggccctcaggctccca

SEQ ID NO: 2511 - RNA, 19 nt, synthetic construct
  misc_feature 1..19: note = Description of Artificial Sequence: Synthetic oligonucleotide
  source 1..19: mol_type = other RNA
tgggccctcaggctcccag

SEQ ID NO: 2512 - RNA, 19 nt, synthetic construct
  misc_feature 1..19: note = Description of Artificial Sequence: Synthetic oligonucleotide
  source 1..19: mol_type = other RNA
gggccctcaggctcccagc

SEQ ID NO: 2513 - RNA, 19 nt, synthetic construct
  misc_feature 1..19: note = Description of Artificial Sequence: Synthetic oligonucleotide
  source 1..19: mol_type = other RNA
ggccctcaggctcccagct

SEQ ID NO: 2514 - RNA, 19 nt, synthetic construct
  misc_feature 1..19: note = Description of Artificial Sequence: Synthetic oligonucleotide
  source 1..19: mol_type = other RNA
gccctcaggctcccagctt

SEQ ID NO: 2515 - RNA, 19 nt, synthetic construct
  misc_feature 1..19: note = Description of Artificial Sequence: Synthetic oligonucleotide
  source 1..19: mol_type = other RNA
ccctcaggctcccagcttg

SEQ ID NO: 2516 - RNA, 19 nt, synthetic construct
  misc_feature 1..19: note = Description of Artificial Sequence: Synthetic oligonucleotide
  source 1..19: mol_type = other RNA
cctcaggctcccagcttgt

SEQ ID NO: 2517 - RNA, 19 nt, synthetic construct
  misc_feature 1..19: note = Description of Artificial Sequence: Synthetic oligonucleotide
  source 1..19: mol_type = other RNA
ctcaggctcccagcttgtc

SEQ ID NO: 2518 - RNA, 19 nt, synthetic construct
  misc_feature 1..19: note = Description of Artificial Sequence: Synthetic oligonucleotide
  source 1..19: mol_type = other RNA
tcaggctcccagcttgtcc

SEQ ID NO: 2519 - RNA, 19 nt, synthetic construct
  misc_feature 1..19: note = Description of Artificial Sequence: Synthetic oligonucleotide
  source 1..19: mol_type = other RNA
caggctcccagcttgtcct

SEQ ID NO: 2520 - RNA, 19 nt, synthetic construct
  misc_feature 1..19: note = Description of Artificial Sequence: Synthetic oligonucleotide
  source 1..19: mol_type = other RNA
aggctcccagcttgtcctg

SEQ ID NO: 2521 - RNA, 19 nt, synthetic construct
  misc_feature 1..19: note = Description of Artificial Sequence: Synthetic oligonucleotide
  source 1..19: mol_type = other RNA
ggctcccagcttgtcctgc

SEQ ID NO: 2522 - RNA, 19 nt, synthetic construct
  misc_feature 1..19: note = Description of Artificial Sequence: Synthetic oligonucleotide
  source 1..19: mol_type = other RNA
gctcccagcttgtcctgct

SEQ ID NO: 2523 - RNA, 19 nt, synthetic construct
  misc_feature 1..19: note = Description of Artificial Sequence: Synthetic oligonucleotide
  source 1..19: mol_type = other RNA
ctcccagcttgtcctgctc

SEQ ID NO: 2524 - RNA, 19 nt, synthetic construct
  misc_feature 1..19: note = Description of Artificial Sequence: Synthetic oligonucleotide
  source 1..19: mol_type = other RNA
tcccagcttgtcctgctca

SEQ ID NO: 2525 - RNA, 19 nt, synthetic construct
  misc_feature 1..19: note = Description of Artificial Sequence: Synthetic oligonucleotide
  source 1..19: mol_type = other RNA
cccagcttgtcctgctcaa

SEQ ID NO: 2526 - RNA, 19 nt, synthetic construct
  misc_feature 1..19: note = Description of Artificial Sequence: Synthetic oligonucleotide
  source 1..19: mol_type = other RNA
ccagcttgtcctgctcaag

SEQ ID NO: 2527 - RNA, 19 nt, synthetic construct
  misc_feature 1..19: note = Description of Artificial Sequence: Synthetic oligonucleotide
  source 1..19: mol_type = other RNA
cagcttgtcctgctcaagc

SEQ ID NO: 2528 - RNA, 19 nt, synthetic construct
  misc_feature 1..19: note = Description of Artificial Sequence: Synthetic oligonucleotide
  source 1..19: mol_type = other RNA
agcttgtcctgctcaagct

SEQ ID NO: 2529 - RNA, 19 nt, synthetic construct
  misc_feature 1..19: note = Description of Artificial Sequence: Synthetic oligonucleotide
  source 1..19: mol_type = other RNA
gcttgtcctgctcaagctg

SEQ ID NO: 2530 - RNA, 19 nt, synthetic construct
  misc_feature 1..19: note = Description of Artificial Sequence: Synthetic oligonucleotide
  source 1..19: mol_type = other RNA
cttgtcctgctcaagctgg

SEQ ID NO: 2531 - RNA, 19 nt, synthetic construct
  misc_feature 1..19: note = Description of Artificial Sequence: Synthetic oligonucleotide
  source 1..19: mol_type = other RNA
ttgtcctgctcaagctgga

SEQ ID NO: 2532 - RNA, 19 nt, synthetic construct
  misc_feature 1..19: note = Description of Artificial Sequence: Synthetic oligonucleotide
  source 1..19: mol_type = other RNA
tgtcctgctcaagctggag

SEQ ID NO: 2533 - RNA, 19 nt, synthetic construct
  misc_feature 1..19: note = Description of Artificial Sequence: Synthetic oligonucleotide
  source 1..19: mol_type = other RNA
gtcctgctcaagctggaga

SEQ ID NO: 2534 - RNA, 19 nt, synthetic construct
  misc_feature 1..19: note = Description of Artificial Sequence: Synthetic oligonucleotide
  source 1..19: mol_type = other RNA
tcctgctcaagctggagag

SEQ ID NO: 2535 - RNA, 19 nt, synthetic construct
  misc_feature 1..19: note = Description of Artificial Sequence: Synthetic oligonucleotide
  source 1..19: mol_type = other RNA
cctgctcaagctggagaga

SEQ ID NO: 2536 - RNA, 19 nt, synthetic construct
  misc_feature 1..19: note = Description of Artificial Sequence: Synthetic oligonucleotide
  source 1..19: mol_type = other RNA
ctgctcaagctggagagat

SEQ ID NO: 2537 - RNA, 19 nt, synthetic construct
  misc_feature 1..19: note = Description of Artificial Sequence: Synthetic oligonucleotide
  source 1..19: mol_type = other RNA
tgctcaagctggagagatc

SEQ ID NO: 2538 - RNA, 19 nt, synthetic construct
  misc_feature 1..19: note = Description of Artificial Sequence: Synthetic oligonucleotide
  source 1..19: mol_type = other RNA
gctcaagctggagagatct

SEQ ID NO: 2539 - RNA, 19 nt, synthetic construct
  misc_feature 1..19: note = Description of Artificial Sequence: Synthetic oligonucleotide
  source 1..19: mol_type = other RNA
ctcaagctggagagatctg

SEQ ID NO: 2540 - RNA, 19 nt, synthetic construct
  misc_feature 1..19: note = Description of Artificial Sequence: Synthetic oligonucleotide
  source 1..19: mol_type = other RNA
tcaagctggagagatctgt

SEQ ID NO: 2541 - RNA, 19 nt, synthetic construct
  misc_feature 1..19: note = Description of Artificial Sequence: Synthetic oligonucleotide
  source 1..19: mol_type = other RNA
caagctggagagatctgtg

SEQ ID NO: 2542 - RNA, 19 nt, synthetic construct
  misc_feature 1..19: note = Description of Artificial Sequence: Synthetic oligonucleotide
  source 1..19: mol_type = other RNA
aagctggagagatctgtga

SEQ ID NO: 2543 - RNA, 19 nt, synthetic construct
  misc_feature 1..19: note = Description of Artificial Sequence: Synthetic oligonucleotide
  source 1..19: mol_type = other RNA
agctggagagatctgtgac

SEQ ID NO: 2544 - RNA, 19 nt, synthetic construct
  misc_feature 1..19: note = Description of Artificial Sequence: Synthetic oligonucleotide
  source 1..19: mol_type = other RNA
gctggagagatctgtgacc

SEQ ID NO: 2545 - RNA, 19 nt, synthetic construct
  misc_feature 1..19: note = Description of Artificial Sequence: Synthetic oligonucleotide
  source 1..19: mol_type = other RNA
ctggagagatctgtgaccc

SEQ ID NO: 2546 - RNA, 19 nt, synthetic construct
  misc_feature 1..19: note = Description of Artificial Sequence: Synthetic oligonucleotide
  source 1..19: mol_type = other RNA
tggagagatctgtgaccct

SEQ ID NO: 2547 - RNA, 19 nt, synthetic construct
  misc_feature 1..19: note = Description of Artificial Sequence: Synthetic oligonucleotide
  source 1..19: mol_type = other RNA
ggagagatctgtgaccctg

SEQ ID NO: 2548 - RNA, 19 nt, synthetic construct
  misc_feature 1..19: note = Description of Artificial Sequence: Synthetic oligonucleotide
  source 1..19: mol_type = other RNA
gagagatctgtgaccctga

SEQ ID NO: 2549 - RNA, 19 nt, synthetic construct
  misc_feature 1..19: note = Description of Artificial Sequence: Synthetic oligonucleotide
  source 1..19: mol_type = other RNA
agagatctgtgaccctgaa

SEQ ID NO: 2550 - RNA, 19 nt, synthetic construct
  misc_feature 1..19: note = Description of Artificial Sequence: Synthetic oligonucleotide
  source 1..19: mol_type = other RNA
gagatctgtgaccctgaac

SEQ ID NO: 2551 - RNA, 19 nt, synthetic construct
  misc_feature 1..19: note = Description of Artificial Sequence: Synthetic oligonucleotide
  source 1..19: mol_type = other RNA
agatctgtgaccctgaacc

SEQ ID NO: 2552 - RNA, 19 nt, synthetic construct
  misc_feature 1..19: note = Description of Artificial Sequence: Synthetic oligonucleotide
  source 1..19: mol_type = other RNA
gatctgtgaccctgaacca

SEQ ID NO: 2553 - RNA, 19 nt, synthetic construct
  misc_feature 1..19: note = Description of Artificial Sequence: Synthetic oligonucleotide
  source 1..19: mol_type = other RNA
atctgtgaccctgaaccag

SEQ ID NO: 2554 - RNA, 19 nt, synthetic construct
  misc_feature 1..19: note = Description of Artificial Sequence: Synthetic oligonucleotide
  source 1..19: mol_type = other RNA
tctgtgaccctgaaccagc

SEQ ID NO: 2555 - RNA, 19 nt, synthetic construct
  misc_feature 1..19: note = Description of Artificial Sequence: Synthetic oligonucleotide
  source 1..19: mol_type = other RNA
ctgtgaccctgaaccagcg

SEQ ID NO: 2556 - RNA, 19 nt, synthetic construct
  misc_feature 1..19: note = Description of Artificial Sequence: Synthetic oligonucleotide
  source 1..19: mol_type = other RNA
tgtgaccctgaaccagcgt

SEQ ID NO: 2557 - RNA, 19 nt, synthetic construct
  misc_feature 1..19: note = Description of Artificial Sequence: Synthetic oligonucleotide
  source 1..19: mol_type = other RNA
gtgaccctgaaccagcgtg

SEQ ID NO: 2558 - RNA, 19 nt, synthetic construct
  misc_feature 1..19: note = Description of Artificial Sequence: Synthetic oligonucleotide
  source 1..19: mol_type = other RNA
tgaccctgaaccagcgtgt

SEQ ID NO: 2559 - RNA, 19 nt, synthetic construct
  misc_feature 1..19: note = Description of Artificial Sequence: Synthetic oligonucleotide
  source 1..19: mol_type = other RNA
gaccctgaaccagcgtgtg

SEQ ID NO: 2560 - RNA, 19 nt, synthetic construct
  misc_feature 1..19: note = Description of Artificial Sequence: Synthetic oligonucleotide
  source 1..19: mol_type = other RNA
accctgaaccagcgtgtgg

SEQ ID NO: 2561 - RNA, 19 nt, synthetic construct
  misc_feature 1..19: note = Description of Artificial Sequence: Synthetic oligonucleotide
  source 1..19: mol_type = other RNA
ccctgaaccagcgtgtggc

SEQ ID NO: 2562 - RNA, 19 nt, synthetic construct
  misc_feature 1..19: note = Description of Artificial Sequence: Synthetic oligonucleotide
  source 1..19: mol_type = other RNA
cctgaaccagcgtgtggcc

SEQ ID NO: 2563 - RNA, 19 nt, synthetic construct
  misc_feature 1..19: note = Description of Artificial Sequence: Synthetic oligonucleotide
  source 1..19: mol_type = other RNA
ctgaaccagcgtgtggccc

SEQ ID NO: 2564 - RNA, 19 nt, synthetic construct
  misc_feature 1..19: note = Description of Artificial Sequence: Synthetic oligonucleotide
  source 1..19: mol_type = other RNA
tgaaccagcgtgtggccct

SEQ ID NO: 2565 - RNA, 19 nt, synthetic construct
  misc_feature 1..19: note = Description of Artificial Sequence: Synthetic oligonucleotide
  source 1..19: mol_type = other RNA
gaaccagcgtgtggccctg

SEQ ID NO: 2566 - RNA, 19 nt, synthetic construct
  misc_feature 1..19: note = Description of Artificial Sequence: Synthetic oligonucleotide
  source 1..19: mol_type = other RNA
aaccagcgtgtggccctga

SEQ ID NO: 2567 - RNA, 19 nt, synthetic construct
  misc_feature 1..19: note = Description of Artificial Sequence: Synthetic oligonucleotide
  source 1..19: mol_type = other RNA
accagcgtgtggccctgat

SEQ ID NO: 2568 - RNA, 19 nt, synthetic construct
  misc_feature 1..19: note = Description of Artificial Sequence: Synthetic oligonucleotide
  source 1..19: mol_type = other RNA
ccagcgtgtggccctgatc

SEQ ID NO: 2569 - RNA, 19 nt, synthetic construct
  misc_feature 1..19: note = Description of Artificial Sequence: Synthetic oligonucleotide
  source 1..19: mol_type = other RNA
cagcgtgtggccctgatct

SEQ ID NO: 2570 - RNA, 19 nt, synthetic construct
  misc_feature 1..19: note = Description of Artificial Sequence: Synthetic oligonucleotide
  source 1..19: mol_type = other RNA
agcgtgtggccctgatctg

SEQ ID NO: 2571 - RNA, 19 nt, synthetic construct
  misc_feature 1..19: note = Description of Artificial Sequence: Synthetic oligonucleotide
  source 1..19: mol_type = other RNA
gcgtgtggccctgatctgc

SEQ ID NO: 2572 - RNA, 19 nt, synthetic construct
  misc_feature 1..19: note = Description of Artificial Sequence: Synthetic oligonucleotide
  source 1..19: mol_type = other RNA
cgtgtggccctgatctgcc

SEQ ID NO: 2573 - RNA, 19 nt, synthetic construct
  misc_feature 1..19: note = Description of Artificial Sequence: Synthetic oligonucleotide
  source 1..19: mol_type = other RNA
gtgtggccctgatctgcct

SEQ ID NO: 2574 - RNA, 19 nt, synthetic construct
  misc_feature 1..19: note = Description of Artificial Sequence: Synthetic oligonucleotide
  source 1..19: mol_type = other RNA
tgtggccctgatctgcctg

SEQ ID NO: 2575 - RNA, 19 nt, synthetic construct
  misc_feature 1..19: note = Description of Artificial Sequence: Synthetic oligonucleotide
  source 1..19: mol_type = other RNA
gtggccctgatctgcctgc

SEQ ID NO: 2576 - RNA, 19 nt, synthetic construct
  misc_feature 1..19: note = Description of Artificial Sequence: Synthetic oligonucleotide
  source 1..19: mol_type = other RNA
tggccctgatctgcctgcc

SEQ ID NO: 2577 - RNA, 19 nt, synthetic construct
  misc_feature 1..19: note = Description of Artificial Sequence: Synthetic oligonucleotide
  source 1..19: mol_type = other RNA
ggccctgatctgcctgccc

SEQ ID NO: 2578 - RNA, 19 nt, synthetic construct
  misc_feature 1..19: note = Description of Artificial Sequence: Synthetic oligonucleotide
  source 1..19: mol_type = other RNA
gccctgatctgcctgcccc

SEQ ID NO: 2579 - RNA, 19 nt, synthetic construct
  misc_feature 1..19: note = Description of Artificial Sequence: Synthetic oligonucleotide
  source 1..19: mol_type = other RNA
ccctgatctgcctgccccc

SEQ ID NO: 2580 - RNA, 19 nt, synthetic construct
  misc_feature 1..19: note = Description of Artificial Sequence: Synthetic oligonucleotide
  source 1..19: mol_type = other RNA
cctgatctgcctgccccct

SEQ ID NO: 2581 - RNA, 19 nt, synthetic construct
  misc_feature 1..19: note = Description of Artificial Sequence: Synthetic oligonucleotide
  source 1..19: mol_type = other RNA
ctgatctgcctgccccctg

SEQ ID NO: 2582 - RNA, 19 nt, synthetic construct
  misc_feature 1..19: note = Description of Artificial Sequence: Synthetic oligonucleotide
  source 1..19: mol_type = other RNA
tgatctgcctgccccctga

SEQ ID NO: 2583 - RNA, 19 nt, synthetic construct
  misc_feature 1..19: note = Description of Artificial Sequence: Synthetic oligonucleotide
  source 1..19: mol_type = other RNA
gatctgcctgccccctgaa

SEQ ID NO: 2584 - RNA, 19 nt, synthetic construct
  misc_feature 1..19: note = Description of Artificial Sequence: Synthetic oligonucleotide
  source 1..19: mol_type = other RNA
atctgcctgccccctgaat

SEQ ID NO: 2585 - RNA, 19 nt, synthetic construct
  misc_feature 1..19: note = Description of Artificial Sequence: Synthetic oligonucleotide
  source 1..19: mol_type = other RNA
tctgcctgccccctgaatg

SEQ ID NO: 2586 - RNA, 19 nt, synthetic construct
  misc_feature 1..19: note = Description of Artificial Sequence: Synthetic oligonucleotide
  source 1..19: mol_type = other RNA
ctgcctgccccctgaatgg

SEQ ID NO: 2587 - RNA, 19 nt, synthetic construct
  misc_feature 1..19: note = Description of Artificial Sequence: Synthetic oligonucleotide
  source 1..19: mol_type = other RNA
tgcctgccccctgaatggt

SEQ ID NO: 2588 - RNA, 19 nt, synthetic construct
  misc_feature 1..19: note = Description of Artificial Sequence: Synthetic oligonucleotide
  source 1..19: mol_type = other RNA
gcctgccccctgaatggta

SEQ ID NO: 2589 - RNA, 19 nt, synthetic construct
  misc_feature 1..19: note = Description of Artificial Sequence: Synthetic oligonucleotide
  source 1..19: mol_type = other RNA
cctgccccctgaatggtat

SEQ ID NO: 2590 - RNA, 19 nt, synthetic construct
  misc_feature 1..19: note = Description of Artificial Sequence: Synthetic oligonucleotide
  source 1..19: mol_type = other RNA
ctgccccctgaatggtatg

SEQ ID NO: 2591 - RNA, 19 nt, synthetic construct
  misc_feature 1..19: note = Description of Artificial Sequence: Synthetic oligonucleotide
  source 1..19: mol_type = other RNA
tgccccctgaatggtatgt

SEQ ID NO: 2592 - RNA, 19 nt, synthetic construct
  misc_feature 1..19: note = Description of Artificial Sequence: Synthetic oligonucleotide
  source 1..19: mol_type = other RNA
gccccctgaatggtatgtg

SEQ ID NO: 2593 - RNA, 19 nt, synthetic construct
  misc_feature 1..19: note = Description of Artificial Sequence: Synthetic oligonucleotide
  source 1..19: mol_type = other RNA
ccccctgaatggtatgtgg

SEQ ID NO: 2594 - RNA, 19 nt, synthetic construct
  misc_feature 1..19: note = Description of Artificial Sequence: Synthetic oligonucleotide
  source 1..19: mol_type = other RNA
cccctgaatggtatgtggt

SEQ ID NO: 2595 - RNA, 19 nt, synthetic construct
  misc_feature 1..19: note = Description of Artificial Sequence: Synthetic oligonucleotide
  source 1..19: mol_type = other RNA
ccctgaatggtatgtggtg

SEQ ID NO: 2596 - RNA, 19 nt, synthetic construct
  misc_feature 1..19: note = Description of Artificial Sequence: Synthetic oligonucleotide
  source 1..19: mol_type = other RNA
cctgaatggtatgtggtgc

SEQ ID NO: 2597 - RNA, 19 nt, synthetic construct
  misc_feature 1..19: note = Description of Artificial Sequence: Synthetic oligonucleotide
  source 1..19: mol_type = other RNA
ctgaatggtatgtggtgcc

SEQ ID NO: 2598 - RNA, 19 nt, synthetic construct
  misc_feature 1..19: note = Description of Artificial Sequence: Synthetic oligonucleotide
  source 1..19: mol_type = other RNA
tgaatggtatgtggtgcct

SEQ ID NO: 2599 - RNA, 19 nt, synthetic construct
  misc_feature 1..19: note = Description of Artificial Sequence: Synthetic oligonucleotide
  source 1..19: mol_type = other RNA
gaatggtatgtggtgcctc

SEQ ID NO: 2600 - RNA, 19 nt, synthetic construct
  misc_feature 1..19: note = Description of Artificial Sequence: Synthetic oligonucleotide
  source 1..19: mol_type = other RNA
aatggtatgtggtgcctcc

SEQ ID NO: 2601 - RNA, 19 nt, synthetic construct
  misc_feature 1..19: note = Description of Artificial Sequence: Synthetic oligonucleotide
  source 1..19: mol_type = other RNA
atggtatgtggtgcctcca

SEQ ID NO: 2602 - RNA, 19 nt, synthetic construct
  misc_feature 1..19: note = Description of Artificial Sequence: Synthetic oligonucleotide
  source 1..19: mol_type = other RNA
tggtatgtggtgcctccag

SEQ ID NO: 2603 - RNA, 19 nt, synthetic construct
  misc_feature 1..19: note = Description of Artificial Sequence: Synthetic oligonucleotide
  source 1..19: mol_type = other RNA
ggtatgtggtgcctccagg

SEQ ID NO: 2604 - RNA, 19 nt, synthetic construct
  misc_feature 1..19: note = Description of Artificial Sequence: Synthetic oligonucleotide
  source 1..19: mol_type = other RNA
gtatgtggtgcctccaggg

SEQ ID NO: 2605 - RNA, 19 nt, synthetic construct
  misc_feature 1..19: note = Description of Artificial Sequence: Synthetic oligonucleotide
  source 1..19: mol_type = other RNA
tatgtggtgcctccaggga

SEQ ID NO: 2606 - RNA, 19 nt, synthetic construct
  misc_feature 1..19: note = Description of Artificial Sequence: Synthetic oligonucleotide
  source 1..19: mol_type = other RNA
atgtggtgcctccagggac

SEQ ID NO: 2607 - RNA, 19 nt, synthetic construct
  misc_feature 1..19: note = Description of Artificial Sequence: Synthetic oligonucleotide
  source 1..19: mol_type = other RNA
tgtggtgcctccagggacc

SEQ ID NO: 2608 - RNA, 19 nt, synthetic construct
  misc_feature 1..19: note = Description of Artificial Sequence: Synthetic oligonucleotide
  source 1..19: mol_type = other RNA
gtggtgcctccagggacca

SEQ ID NO: 2609 - RNA, 19 nt, synthetic construct
  misc_feature 1..19: note = Description of Artificial Sequence: Synthetic oligonucleotide
  source 1..19: mol_type = other RNA
tggtgcctccagggaccaa

SEQ ID NO: 2610 - RNA, 19 nt, synthetic construct
  misc_feature 1..19: note = Description of Artificial Sequence: Synthetic oligonucleotide
  source 1..19: mol_type = other RNA
ggtgcctccagggaccaag

SEQ ID NO: 2611 - RNA, 19 nt, synthetic construct
  misc_feature 1..19: note = Description of Artificial Sequence: Synthetic oligonucleotide
  source 1..19: mol_type = other RNA
gtgcctccagggaccaagt

SEQ ID NO: 2612 - RNA, 19 nt, synthetic construct
  misc_feature 1..19: note = Description of Artificial Sequence: Synthetic oligonucleotide
  source 1..19: mol_type = other RNA
tgcctccagggaccaagtg

SEQ ID NO: 2613 - RNA, 19 nt, synthetic construct
  misc_feature 1..19: note = Description of Artificial Sequence: Synthetic oligonucleotide
  source 1..19: mol_type = other RNA
gcctccagggaccaagtgt

SEQ ID NO: 2614 - RNA, 19 nt, synthetic construct
  misc_feature 1..19: note = Description of Artificial Sequence: Synthetic oligonucleotide
  source 1..19: mol_type = other RNA
cctccagggaccaagtgtg

SEQ ID NO: 2615 - RNA, 19 nt, synthetic construct
  misc_feature 1..19: note = Description of Artificial Sequence: Synthetic oligonucleotide
  source 1..19: mol_type = other RNA
ctccagggaccaagtgtga

SEQ ID NO: 2616 - RNA, 19 nt, synthetic construct
  misc_feature 1..19: note = Description of Artificial Sequence: Synthetic oligonucleotide
  source 1..19: mol_type = other RNA
tccagggaccaagtgtgag

SEQ ID NO: 2617 - RNA, 19 nt, synthetic construct
  misc_feature 1..19: note = Description of Artificial Sequence: Synthetic oligonucleotide
  source 1..19: mol_type = other RNA
ccagggaccaagtgtgaga

SEQ ID NO: 2618 - RNA, 19 nt, synthetic construct
  misc_feature 1..19: note = Description of Artificial Sequence: Synthetic oligonucleotide
  source 1..19: mol_type = other RNA
cagggaccaagtgtgagat

SEQ ID NO: 2619 - RNA, 19 nt, synthetic construct
  misc_feature 1..19: note = Description of Artificial Sequence: Synthetic oligonucleotide
  source 1..19: mol_type = other RNA
agggaccaagtgtgagatt

SEQ ID NO: 2620 - RNA, 19 nt, synthetic construct
  misc_feature 1..19: note = Description of Artificial Sequence: Synthetic oligonucleotide
  source 1..19: mol_type = other RNA
gggaccaagtgtgagattg

SEQ ID NO: 2621 - RNA, 19 nt, synthetic construct
  misc_feature 1..19: note = Description of Artificial Sequence: Synthetic oligonucleotide
  source 1..19: mol_type = other RNA
ggaccaagtgtgagattgc

SEQ ID NO: 2622 - RNA, 19 nt, synthetic construct
  misc_feature 1..19: note = Description of Artificial Sequence: Synthetic oligonucleotide
  source 1..19: mol_type = other RNA
gaccaagtgtgagattgca

SEQ ID NO: 2623 - RNA, 19 nt, synthetic construct
  misc_feature 1..19: note = Description of Artificial Sequence: Synthetic oligonucleotide
  source 1..19: mol_type = other RNA
accaagtgtgagattgcag

SEQ ID NO: 2624 - RNA, 19 nt, synthetic construct
  misc_feature 1..19: note = Description of Artificial Sequence: Synthetic oligonucleotide
  source 1..19: mol_type = other RNA
ccaagtgtgagattgcagg

SEQ ID NO: 2625 - RNA, 19 nt, synthetic construct
  misc_feature 1..19: note = Description of Artificial Sequence: Synthetic oligonucleotide
  source 1..19: mol_type = other RNA
caagtgtgagattgcaggc

SEQ ID NO: 2626 - RNA, 19 nt, synthetic construct
  misc_feature 1..19: note = Description of Artificial Sequence: Synthetic oligonucleotide
  source 1..19: mol_type = other RNA
aagtgtgagattgcaggct

SEQ ID NO: 2627 - RNA, 19 nt, synthetic construct
  misc_feature 1..19: note = Description of Artificial Sequence: Synthetic oligonucleotide
  source 1..19: mol_type = other RNA
agtgtgagattgcaggctg

SEQ ID NO: 2628 - RNA, 19 nt, synthetic construct
  misc_feature 1..19: note = Description of Artificial Sequence: Synthetic oligonucleotide
  source 1..19: mol_type = other RNA
gtgtgagattgcaggctgg

SEQ ID NO: 2629 - RNA, 19 nt, synthetic construct
  misc_feature 1..19: note = Description of Artificial Sequence: Synthetic oligonucleotide
  source 1..19: mol_type = other RNA
tgtgagattgcaggctggg

SEQ ID NO: 2630 - RNA, 19 nt, synthetic construct
  misc_feature 1..19: note = Description of Artificial Sequence: Synthetic oligonucleotide
  source 1..19: mol_type = other RNA
gtgagattgcaggctgggg

SEQ ID NO: 2631 - RNA, 19 nt, synthetic construct
  misc_feature 1..19: note = Description of Artificial Sequence: Synthetic oligonucleotide
  source 1..19: mol_type = other RNA
tgagattgcaggctggggt

SEQ ID NO: 2632 - RNA, 19 nt, synthetic construct
  misc_feature 1..19: note = Description of Artificial Sequence: Synthetic oligonucleotide
  source 1..19: mol_type = other RNA
gagattgcaggctggggtg

SEQ ID NO: 2633 - RNA, 19 nt, synthetic construct
  misc_feature 1..19: note = Description of Artificial Sequence: Synthetic oligonucleotide
  source 1..19: mol_type = other RNA
agattgcaggctggggtga

SEQ ID NO: 2634 - RNA, 19 nt, synthetic construct
  misc_feature 1..19: note = Description of Artificial Sequence: Synthetic oligonucleotide
  source 1..19: mol_type = other RNA
gattgcaggctggggtgag

SEQ ID NO: 2635 - RNA, 19 nt, synthetic construct
  misc_feature 1..19: note = Description of Artificial Sequence: Synthetic oligonucleotide
  source 1..19: mol_type = other RNA
attgcaggctggggtgaga

SEQ ID NO: 2636 - RNA, 19 nt, synthetic construct
  misc_feature 1..19: note = Description of Artificial Sequence: Synthetic oligonucleotide
  source 1..19: mol_type = other RNA
ttgcaggctggggtgagac

SEQ ID NO: 2637 - RNA, 19 nt, synthetic construct
  misc_feature 1..19: note = Description of Artificial Sequence: Synthetic oligonucleotide
  source 1..19: mol_type = other RNA
tgcaggctggggtgagacc

SEQ ID NO: 2638 - RNA, 19 nt, synthetic construct
  misc_feature 1..19: note = Description of Artificial Sequence: Synthetic oligonucleotide
  source 1..19: mol_type = other RNA
gcaggctggggtgagacca

SEQ ID NO: 2639 - RNA, 19 nt, synthetic construct
  misc_feature 1..19: note = Description of Artificial Sequence: Synthetic oligonucleotide
  source 1..19: mol_type = other RNA
caggctggggtgagaccaa

SEQ ID NO: 2640 - RNA, 19 nt, synthetic construct
  misc_feature 1..19: note = Description of Artificial Sequence: Synthetic oligonucleotide
  source 1..19: mol_type = other RNA
aggctggggtgagaccaaa

SEQ ID NO: 2641 - RNA, 19 nt, synthetic construct
  misc_feature 1..19: note = Description of Artificial Sequence: Synthetic oligonucleotide
  source 1..19: mol_type = other RNA
ggctggggtgagaccaaag

SEQ ID NO: 2642 - RNA, 19 nt, synthetic construct
  misc_feature 1..19: note = Description of Artificial Sequence: Synthetic oligonucleotide
  source 1..19: mol_type = other RNA
gctggggtgagaccaaagg

SEQ ID NO: 2643 - RNA, 19 nt, synthetic construct
  misc_feature 1..19: note = Description of Artificial Sequence: Synthetic oligonucleotide
  source 1..19: mol_type = other RNA
ctggggtgagaccaaaggt

SEQ ID NO: 2644 - RNA, 19 nt, synthetic construct
  misc_feature 1..19: note = Description of Artificial Sequence: Synthetic oligonucleotide
  source 1..19: mol_type = other RNA
tggggtgagaccaaaggta

SEQ ID NO: 2645 - RNA, 19 nt, synthetic construct
  misc_feature 1..19: note = Description of Artificial Sequence: Synthetic oligonucleotide
  source 1..19: mol_type = other RNA
ggggtgagaccaaaggtac

SEQ ID NO: 2646 - RNA, 19 nt, synthetic construct
  misc_feature 1..19: note = Description of Artificial Sequence: Synthetic oligonucleotide
  source 1..19: mol_type = other RNA
gggtgagaccaaaggtacg

SEQ ID NO: 2647 - RNA, 19 nt, synthetic construct
  misc_feature 1..19: note = Description of Artificial Sequence: Synthetic oligonucleotide
  source 1..19: mol_type = other RNA
ggtgagaccaaaggtacgg

SEQ ID NO: 2648 - RNA, 19 nt, synthetic construct
  misc_feature 1..19: note = Description of Artificial Sequence: Synthetic oligonucleotide
  source 1..19: mol_type = other RNA
gtgagaccaaaggtacggg

SEQ ID NO: 2649 - RNA, 19 nt, synthetic construct
  misc_feature 1..19: note = Description of Artificial Sequence: Synthetic oligonucleotide
  source 1..19: mol_type = other RNA
tgagaccaaaggtacgggt

SEQ ID NO: 2650 - RNA, 19 nt, synthetic construct
  misc_feature 1..19: note = Description of Artificial Sequence: Synthetic oligonucleotide
  source 1..19: mol_type = other RNA
gagaccaaaggtacgggta

SEQ ID NO: 2651 - RNA, 19 nt, synthetic construct
  misc_feature 1..19: note = Description of Artificial Sequence: Synthetic oligonucleotide
  source 1..19: mol_type = other RNA
agaccaaaggtacgggtaa

SEQ ID NO: 2652 - RNA, 19 nt, synthetic construct
  misc_feature 1..19: note = Description of Artificial Sequence: Synthetic oligonucleotide
  source 1..19: mol_type = other RNA
gaccaaaggtacgggtaat

SEQ ID NO: 2653 - RNA, 19 nt, synthetic construct
  misc_feature 1..19: note = Description of Artificial Sequence: Synthetic oligonucleotide
  source 1..19: mol_type = other RNA
accaaaggtacgggtaatg

SEQ ID NO: 2654 - RNA, 19 nt, synthetic construct
  misc_feature 1..19: note = Description of Artificial Sequence: Synthetic oligonucleotide
  source 1..19: mol_type = other RNA
ccaaaggtacgggtaatga

SEQ ID NO: 2655 - RNA, 19 nt, synthetic construct
  misc_feature 1..19: note = Description of Artificial Sequence: Synthetic oligonucleotide
  source 1..19: mol_type = other RNA
caaaggtacgggtaatgac

SEQ ID NO: 2656 - RNA, 19 nt, synthetic construct
  misc_feature 1..19: note = Description of Artificial Sequence: Synthetic oligonucleotide
  source 1..19: mol_type = other RNA
aaaggtacgggtaatgaca

SEQ ID NO: 2657 - RNA, 19 nt, synthetic construct
  misc_feature 1..19: note = Description of Artificial Sequence: Synthetic oligonucleotide
  source 1..19: mol_type = other RNA
aaggtacgggtaatgacac

SEQ ID NO: 2658 - RNA, 19 nt, synthetic construct
  misc_feature 1..19: note = Description of Artificial Sequence: Synthetic oligonucleotide
  source 1..19: mol_type = other RNA
aggtacgggtaatgacaca

SEQ ID NO: 2659 - RNA, 19 nt, synthetic construct
  misc_feature 1..19: note = Description of Artificial Sequence: Synthetic oligonucleotide
  source 1..19: mol_type = other RNA
ggtacgggtaatgacacag

SEQ ID NO: 2660 - RNA, 19 nt, synthetic construct
  misc_feature 1..19: note = Description of Artificial Sequence: Synthetic oligonucleotide
  source 1..19: mol_type = other RNA
gtacgggtaatgacacagt

SEQ ID NO: 2661 - RNA, 19 nt, synthetic construct
  misc_feature 1..19: note = Description of Artificial Sequence: Synthetic oligonucleotide
  source 1..19: mol_type = other RNA
tacgggtaatgacacagtc

SEQ ID NO: 2662 - RNA, 19 nt, synthetic construct
  misc_feature 1..19: note = Description of Artificial Sequence: Synthetic oligonucleotide
  source 1..19: mol_type = other RNA
acgggtaatgacacagtcc

SEQ ID NO: 2663 - RNA, 19 nt, synthetic construct
  misc_feature 1..19: note = Description of Artificial Sequence: Synthetic oligonucleotide
  source 1..19: mol_type = other RNA
cgggtaatgacacagtcct

SEQ ID NO: 2664 - RNA, 19 nt, synthetic construct
  misc_feature 1..19: note = Description of Artificial Sequence: Synthetic oligonucleotide
  source 1..19: mol_type = other RNA
gggtaatgacacagtccta

SEQ ID NO: 2665 - RNA, 19 nt, synthetic construct
  misc_feature 1..19: note = Description of Artificial Sequence: Synthetic oligonucleotide
  source 1..19: mol_type = other RNA
ggtaatgacacagtcctaa

SEQ ID NO: 2666 - RNA, 19 nt, synthetic construct
  misc_feature 1..19: note = Description of Artificial Sequence: Synthetic oligonucleotide
  source 1..19: mol_type = other RNA
gtaatgacacagtcctaaa

SEQ ID NO: 2667 - RNA, 19 nt, synthetic construct
  misc_feature 1..19: note = Description of Artificial Sequence: Synthetic oligonucleotide
  source 1..19: mol_type = other RNA
taatgacacagtcctaaat

SEQ ID NO: 2668 - RNA, 19 nt, synthetic construct
  misc_feature 1..19: note = Description of Artificial Sequence: Synthetic oligonucleotide
  source 1..19: mol_type = other RNA
aatgacacagtcctaaatg

SEQ ID NO: 2669 - RNA, 19 nt, synthetic construct
  misc_feature 1..19: note = Description of Artificial Sequence: Synthetic oligonucleotide
  source 1..19: mol_type = other RNA
atgacacagtcctaaatgt

SEQ ID NO: 2670 - RNA, 19 nt, synthetic construct
  misc_feature 1..19: note = Description of Artificial Sequence: Synthetic oligonucleotide
  source 1..19: mol_type = other RNA
tgacacagtcctaaatgtg

SEQ ID NO: 2671 - RNA, 19 nt, synthetic construct
  misc_feature 1..19: note = Description of Artificial Sequence: Synthetic oligonucleotide
  source 1..19: mol_type = other RNA
gacacagtcctaaatgtgg

SEQ ID NO: 2672 - RNA, 19 nt, synthetic construct
  misc_feature 1..19: note = Description of Artificial Sequence: Synthetic oligonucleotide
  source 1..19: mol_type = other RNA
acacagtcctaaatgtggc

SEQ ID NO: 2673 - RNA, 19 nt, synthetic construct
  misc_feature 1..19: note = Description of Artificial Sequence: Synthetic oligonucleotide
  source 1..19: mol_type = other RNA
cacagtcctaaatgtggcc

SEQ ID NO: 2674 - RNA, 19 nt, synthetic construct
  misc_feature 1..19: note = Description of Artificial Sequence: Synthetic oligonucleotide
  source 1..19: mol_type = other RNA
acagtcctaaatgtggcct

SEQ ID NO: 2675 - RNA, 19 nt, synthetic construct
  misc_feature 1..19: note = Description of Artificial Sequence: Synthetic oligonucleotide
  source 1..19: mol_type = other RNA
cagtcctaaatgtggcctt

SEQ ID NO: 2676 - RNA, 19 nt, synthetic construct
  misc_feature 1..19: note = Description of Artificial Sequence: Synthetic oligonucleotide
  source 1..19: mol_type = other RNA
agtcctaaatgtggccttg

SEQ ID NO: 2677 - RNA, 19 nt, synthetic construct
  misc_feature 1..19: note = Description of Artificial Sequence: Synthetic oligonucleotide
  source 1..19: mol_type = other RNA
gtcctaaatgtggccttgc

SEQ ID NO: 2678 - RNA, 19 nt, synthetic construct
  misc_feature 1..19: note = Description of Artificial Sequence: Synthetic oligonucleotide
  source 1..19: mol_type = other RNA
tcctaaatgtggccttgct

SEQ ID NO: 2679 - RNA, 19 nt, synthetic construct
  misc_feature 1..19: note = Description of Artificial Sequence: Synthetic oligonucleotide
  source 1..19: mol_type = other RNA
cctaaatgtggccttgctg

SEQ ID NO: 2680 - RNA, 19 nt, synthetic construct
  misc_feature 1..19: note = Description of Artificial Sequence: Synthetic oligonucleotide
  source 1..19: mol_type = other RNA
ctaaatgtggccttgctga

SEQ ID NO: 2681 - RNA, 19 nt, synthetic construct
  misc_feature 1..19: note = Description of Artificial Sequence: Synthetic oligonucleotide
  source 1..19: mol_type = other RNA
taaatgtggccttgctgaa

SEQ ID NO: 2682 - RNA, 19 nt, synthetic construct
  misc_feature 1..19: note = Description of Artificial Sequence: Synthetic oligonucleotide
  source 1..19: mol_type = other RNA
aaatgtggccttgctgaat

SEQ ID NO: 2683 - RNA, 19 nt, synthetic construct
  misc_feature 1..19: note = Description of Artificial Sequence: Synthetic oligonucleotide
  source 1..19: mol_type = other RNA
aatgtggccttgctgaatg

SEQ ID NO: 2684 - RNA, 19 nt, synthetic construct
  misc_feature 1..19: note = Description of Artificial Sequence: Synthetic oligonucleotide
  source 1..19: mol_type = other RNA
atgtggccttgctgaatgt

SEQ ID NO: 2685 - RNA, 19 nt, synthetic construct
  misc_feature 1..19: note = Description of Artificial Sequence: Synthetic oligonucleotide
  source 1..19: mol_type = other RNA
tgtggccttgctgaatgtc

SEQ ID NO: 2686 - RNA, 19 nt, synthetic construct
  misc_feature 1..19: note = Description of Artificial Sequence: Synthetic oligonucleotide
  source 1..19: mol_type = other RNA
gtggccttgctgaatgtca

SEQ ID NO: 2687 - RNA, 19 nt, synthetic construct
  misc_feature 1..19: note = Description of Artificial Sequence: Synthetic oligonucleotide
  source 1..19: mol_type = other RNA
tggccttgctgaatgtcat

SEQ ID NO: 2688 - RNA, 19 nt, synthetic construct
  misc_feature 1..19: note = Description of Artificial Sequence: Synthetic oligonucleotide
  source 1..19: mol_type = other RNA
ggccttgctgaatgtcatc

SEQ ID NO: 2689 - RNA, 19 nt, synthetic construct
  misc_feature 1..19: note = Description of Artificial Sequence: Synthetic oligonucleotide
  source 1..19: mol_type = other RNA
gccttgctgaatgtcatct

SEQ ID NO: 2690 - RNA, 19 nt, synthetic construct
  misc_feature 1..19: note = Description of Artificial Sequence: Synthetic oligonucleotide
  source 1..19: mol_type = other RNA
ccttgctgaatgtcatctc

SEQ ID NO: 2691 - RNA, 19 nt, synthetic construct
  misc_feature 1..19: note = Description of Artificial Sequence: Synthetic oligonucleotide
  source 1..19: mol_type = other RNA
cttgctgaatgtcatctcc

SEQ ID NO: 2692 - RNA, 19 nt, synthetic construct
  misc_feature 1..19: note = Description of Artificial Sequence: Synthetic oligonucleotide
  source 1..19: mol_type = other RNA
ttgctgaatgtcatctcca

SEQ ID NO: 2693 - RNA, 19 nt, synthetic construct
  misc_feature 1..19: note = Description of Artificial Sequence: Synthetic oligonucleotide
  source 1..19: mol_type = other RNA
tgctgaatgtcatctccaa

SEQ ID NO: 2694 - RNA, 19 nt, synthetic construct
  misc_feature 1..19: note = Description of Artificial Sequence: Synthetic oligonucleotide
  source 1..19: mol_type = other RNA
gctgaatgtcatctccaac

SEQ ID NO: 2695 - RNA, 19 nt, synthetic construct
  misc_feature 1..19: note = Description of Artificial Sequence: Synthetic oligonucleotide
  source 1..19: mol_type = other RNA
ctgaatgtcatctccaacc

SEQ ID NO: 2696 - RNA, 19 nt, synthetic construct
  misc_feature 1..19: note = Description of Artificial Sequence: Synthetic oligonucleotide
  source 1..19: mol_type = other RNA
tgaatgtcatctccaacca

SEQ ID NO: 2697 - RNA, 19 nt, synthetic construct
  misc_feature 1..19: note = Description of Artificial Sequence: Synthetic oligonucleotide
  source 1..19: mol_type = other RNA
gaatgtcatctccaaccag

SEQ ID NO: 2698 - RNA, 19 nt, synthetic construct
  misc_feature 1..19: note = Description of Artificial Sequence: Synthetic oligonucleotide
  source 1..19: mol_type = other RNA
aatgtcatctccaaccagg

SEQ ID NO: 2699 - RNA, 19 nt, synthetic construct
  misc_feature 1..19: note = Description of Artificial Sequence: Synthetic oligonucleotide
  source 1..19: mol_type = other RNA
atgtcatctccaaccagga

SEQ ID NO: 2700 - RNA, 19 nt, synthetic construct
  misc_feature 1..19: note = Description of Artificial Sequence: Synthetic oligonucleotide
  source 1..19: mol_type = other RNA
tgtcatctccaaccaggag

SEQ ID NO: 2701 - RNA, 19 nt, synthetic construct
  misc_feature 1..19: note = Description of Artificial Sequence: Synthetic oligonucleotide
  source 1..19: mol_type = other RNA
gtcatctccaaccaggagt

SEQ ID NO: 2702 - RNA, 19 nt, synthetic construct
  misc_feature 1..19: note = Description of Artificial Sequence: Synthetic oligonucleotide
  source 1..19: mol_type = other RNA
tcatctccaaccaggagtg

SEQ ID NO: 2703 - RNA, 19 nt, synthetic construct
  misc_feature 1..19: note = Description of Artificial Sequence: Synthetic oligonucleotide
  source 1..19: mol_type = other RNA
catctccaaccaggagtgt

SEQ ID NO: 2704 - RNA, 19 nt, synthetic construct
  misc_feature 1..19: note = Description of Artificial Sequence: Synthetic oligonucleotide
  source 1..19: mol_type = other RNA
atctccaaccaggagtgta

SEQ ID NO: 2705 - RNA, 19 nt, synthetic construct
  misc_feature 1..19: note = Description of Artificial Sequence: Synthetic oligonucleotide
  source 1..19: mol_type = other RNA
tctccaaccaggagtgtaa

SEQ ID NO: 2706 - RNA, 19 nt, synthetic construct
  misc_feature 1..19: note = Description of Artificial Sequence: Synthetic oligonucleotide
  source 1..19: mol_type = other RNA
ctccaaccaggagtgtaac

SEQ ID NO: 2707 - RNA, 19 nt, synthetic construct
  misc_feature 1..19: note = Description of Artificial Sequence: Synthetic oligonucleotide
  source 1..19: mol_type = other RNA
tccaaccaggagtgtaaca

SEQ ID NO: 2708 - RNA, 19 nt, synthetic construct
  misc_feature 1..19: note = Description of Artificial Sequence: Synthetic oligonucleotide
  source 1..19: mol_type = other RNA
ccaaccaggagtgtaacat

SEQ ID NO: 2709 - RNA, 19 nt, synthetic construct
  misc_feature 1..19: note = Description of Artificial Sequence: Synthetic oligonucleotide
  source 1..19: mol_type = other RNA
caaccaggagtgtaacatc

SEQ ID NO: 2710 - RNA, 19 nt, synthetic construct
  misc_feature 1..19: note = Description of Artificial Sequence: Synthetic oligonucleotide
  source 1..19: mol_type = other RNA
aaccaggagtgtaacatca

SEQ ID NO: 2711 - RNA, 19 nt, synthetic construct
  misc_feature 1..19: note = Description of Artificial Sequence: Synthetic oligonucleotide
  source 1..19: mol_type = other RNA
accaggagtgtaacatcaa

SEQ ID NO: 2712 - RNA, 19 nt, synthetic construct
  misc_feature 1..19: note = Description of Artificial Sequence: Synthetic oligonucleotide
  source 1..19: mol_type = other RNA
ccaggagtgtaacatcaag

SEQ ID NO: 2713 - RNA, 19 nt, synthetic construct
  misc_feature 1..19: note = Description of Artificial Sequence: Synthetic oligonucleotide
  source 1..19: mol_type = other RNA
caggagtgtaacatcaagc

SEQ ID NO: 2714 - RNA, 19 nt, synthetic construct
  misc_feature 1..19: note = Description of Artificial Sequence: Synthetic oligonucleotide
  source 1..19: mol_type = other RNA
aggagtgtaacatcaagca

SEQ ID NO: 2715 - RNA, 19 nt, synthetic construct
  misc_feature 1..19: note = Description of Artificial Sequence: Synthetic oligonucleotide
  source 1..19: mol_type = other RNA
ggagtgtaacatcaagcac

SEQ ID NO: 2716 - RNA, 19 nt, synthetic construct
  misc_feature 1..19: note = Description of Artificial Sequence: Synthetic oligonucleotide
  source 1..19: mol_type = other RNA
gagtgtaacatcaagcacc

SEQ ID NO: 2717 - RNA, 19 nt, synthetic construct
  misc_feature 1..19: note = Description of Artificial Sequence: Synthetic oligonucleotide
  source 1..19: mol_type = other RNA
agtgtaacatcaagcaccg

SEQ ID NO: 2718 - RNA, 19 nt, synthetic construct
  misc_feature 1..19: note = Description of Artificial Sequence: Synthetic oligonucleotide
  source 1..19: mol_type = other RNA
gtgtaacatcaagcaccga

SEQ ID NO: 2719 - RNA, 19 nt, synthetic construct
  misc_feature 1..19: note = Description of Artificial Sequence: Synthetic oligonucleotide
  source 1..19: mol_type = other RNA
tgtaacatcaagcaccgag

SEQ ID NO: 2720 - RNA, 19 nt, synthetic construct
  misc_feature 1..19: note = Description of Artificial Sequence: Synthetic oligonucleotide
  source 1..19: mol_type = other RNA
gtaacatcaagcaccgagg

SEQ ID NO: 2721 - RNA, 19 nt, synthetic construct
  misc_feature 1..19: note = Description of Artificial Sequence: Synthetic oligonucleotide
  source 1..19: mol_type = other RNA
taacatcaagcaccgagga

SEQ ID NO: 2722 - RNA, 19 nt, synthetic construct
  misc_feature 1..19: note = Description of Artificial Sequence: Synthetic oligonucleotide
  source 1..19: mol_type = other RNA
aacatcaagcaccgaggac

SEQ ID NO: 2723 - RNA, 19 nt, synthetic construct
  misc_feature 1..19: note = Description of Artificial Sequence: Synthetic oligonucleotide
  source 1..19: mol_type = other RNA
acatcaagcaccgaggacg

SEQ ID NO: 2724 - RNA, 19 nt, synthetic construct
  misc_feature 1..19: note = Description of Artificial Sequence: Synthetic oligonucleotide
  source 1..19: mol_type = other RNA
catcaagcaccgaggacgt

SEQ ID NO: 2725 - RNA, 19 nt, synthetic construct
  misc_feature 1..19: note = Description of Artificial Sequence: Synthetic oligonucleotide
  source 1..19: mol_type = other RNA
atcaagcaccgaggacgtg

SEQ ID NO: 2726 - RNA, 19 nt, synthetic construct
  misc_feature 1..19: note = Description of Artificial Sequence: Synthetic oligonucleotide
  source 1..19: mol_type = other RNA
tcaagcaccgaggacgtgt

SEQ ID NO: 2727 - RNA, 19 nt, synthetic construct
  misc_feature 1..19: note = Description of Artificial Sequence: Synthetic oligonucleotide
  source 1..19: mol_type = other RNA
caagcaccgaggacgtgtg

SEQ ID NO: 2728 - RNA, 19 nt, synthetic construct
  misc_feature 1..19: note = Description of Artificial Sequence: Synthetic oligonucleotide
  source 1..19: mol_type = other RNA
aagcaccgaggacgtgtgc

SEQ ID NO: 2729 - RNA, 19 nt, synthetic construct
  misc_feature 1..19: note = Description of Artificial Sequence: Synthetic oligonucleotide
  source 1..19: mol_type = other RNA
agcaccgaggacgtgtgcg

SEQ ID NO: 2730 - RNA, 19 nt, synthetic construct
  misc_feature 1..19: note = Description of Artificial Sequence: Synthetic oligonucleotide
  source 1..19: mol_type = other RNA
gcaccgaggacgtgtgcgg

SEQ ID NO: 2731 - RNA, 19 nt, synthetic construct
  misc_feature 1..19: note = Description of Artificial Sequence: Synthetic oligonucleotide
  source 1..19: mol_type = other RNA
caccgaggacgtgtgcggg

SEQ ID NO: 2732 - RNA, 19 nt, synthetic construct
  misc_feature 1..19: note = Description of Artificial Sequence: Synthetic oligonucleotide
  source 1..19: mol_type = other RNA
accgaggacgtgtgcggga

SEQ ID NO: 2733 - RNA, 19 nt, synthetic construct
  misc_feature 1..19: note = Description of Artificial Sequence: Synthetic oligonucleotide
  source 1..19: mol_type = other RNA
ccgaggacgtgtgcgggag

SEQ ID NO: 2734 - RNA, 19 nt, synthetic construct
  misc_feature 1..19: note = Description of Artificial Sequence: Synthetic oligonucleotide
  source 1..19: mol_type = other RNA
cgaggacgtgtgcgggaga

SEQ ID NO: 2735 - RNA, 19 nt, synthetic construct
  misc_feature 1..19: note = Description of Artificial Sequence: Synthetic oligonucleotide
  source 1..19: mol_type = other RNA
gaggacgtgtgcgggagag

SEQ ID NO: 2736 - RNA, 19 nt, synthetic construct
  misc_feature 1..19: note = Description of Artificial Sequence: Synthetic oligonucleotide
  source 1..19: mol_type = other RNA
aggacgtgtgcgggagagt

SEQ ID NO: 2737 - RNA, 19 nt, synthetic construct
  misc_feature 1..19: note = Description of Artificial Sequence: Synthetic oligonucleotide
  source 1..19: mol_type = other RNA
ggacgtgtgcgggagagtg

SEQ ID NO: 2738 - RNA, 19 nt, synthetic construct
  misc_feature 1..19: note = Description of Artificial Sequence: Synthetic oligonucleotide
  source 1..19: mol_type = other RNA
gacgtgtgcgggagagtga

SEQ ID NO: 2739 - RNA, 19 nt, synthetic construct
  misc_feature 1..19: note = Description of Artificial Sequence: Synthetic oligonucleotide
  source 1..19: mol_type = other RNA
acgtgtgcgggagagtgag

SEQ ID NO: 2740 - RNA, 19 nt, synthetic construct
  misc_feature 1..19: note = Description of Artificial Sequence: Synthetic oligonucleotide
  source 1..19: mol_type = other RNA
cgtgtgcgggagagtgaga

SEQ ID NO: 2741 - RNA, 19 nt, synthetic construct
  misc_feature 1..19: note = Description of Artificial Sequence: Synthetic oligonucleotide
  source 1..19: mol_type = other RNA
gtgtgcgggagagtgagat

SEQ ID NO: 2742 - RNA, 19 nt, synthetic construct
  misc_feature 1..19: note = Description of Artificial Sequence: Synthetic oligonucleotide
  source 1..19: mol_type = other RNA
tgtgcgggagagtgagatg

SEQ ID NO: 2743 - RNA, 19 nt, synthetic construct
  misc_feature 1..19: note = Description of Artificial Sequence: Synthetic oligonucleotide
  source 1..19: mol_type = other RNA
gtgcgggagagtgagatgt

SEQ ID NO: 2744 - RNA, 19 nt, synthetic construct
  misc_feature 1..19: note = Description of Artificial Sequence: Synthetic oligonucleotide
  source 1..19: mol_type = other RNA
tgcgggagagtgagatgtg

SEQ ID NO: 2745 - RNA, 19 nt, synthetic construct
  misc_feature 1..19: note = Description of Artificial Sequence: Synthetic oligonucleotide
  source 1..19: mol_type = other RNA
gcgggagagtgagatgtgc

SEQ ID NO: 2746 - RNA, 19 nt, synthetic construct
  misc_feature 1..19: note = Description of Artificial Sequence: Synthetic oligonucleotide
  source 1..19: mol_type = other RNA
cgggagagtgagatgtgca

SEQ ID NO: 2747 - RNA, 19 nt, synthetic construct
  misc_feature 1..19: note = Description of Artificial Sequence: Synthetic oligonucleotide
  source 1..19: mol_type = other RNA
gggagagtgagatgtgcac

SEQ ID NO: 2748 - RNA, 19 nt, synthetic construct
  misc_feature 1..19: note = Description of Artificial Sequence: Synthetic oligonucleotide
  source 1..19: mol_type = other RNA
ggagagtgagatgtgcact

SEQ ID NO: 2749 - RNA, 19 nt, synthetic construct
  misc_feature 1..19: note = Description of Artificial Sequence: Synthetic oligonucleotide
  source 1..19: mol_type = other RNA
gagagtgagatgtgcactg

SEQ ID NO: 2750 - RNA, 19 nt, synthetic construct
  misc_feature 1..19: note = Description of Artificial Sequence: Synthetic oligonucleotide
  source 1..19: mol_type = other RNA
agagtgagatgtgcactga

SEQ ID NO: 2751 - RNA, 19 nt, synthetic construct
  misc_feature 1..19: note = Description of Artificial Sequence: Synthetic oligonucleotide
  source 1..19: mol_type = other RNA
gagtgagatgtgcactgag

SEQ ID NO: 2752 - RNA, 19 nt, synthetic construct
  misc_feature 1..19: note = Description of Artificial Sequence: Synthetic oligonucleotide
  source 1..19: mol_type = other RNA
agtgagatgtgcactgagg

SEQ ID NO: 2753 - RNA, 19 nt, synthetic construct
  misc_feature 1..19: note = Description of Artificial Sequence: Synthetic oligonucleotide
  source 1..19: mol_type = other RNA
gtgagatgtgcactgaggg

SEQ ID NO: 2754 - RNA, 19 nt, synthetic construct
  misc_feature 1..19: note = Description of Artificial Sequence: Synthetic oligonucleotide
  source 1..19: mol_type = other RNA
tgagatgtgcactgaggga

SEQ ID NO: 2755 - RNA, 19 nt, synthetic construct
  misc_feature 1..19: note = Description of Artificial Sequence: Synthetic oligonucleotide
  source 1..19: mol_type = other RNA
gagatgtgcactgagggac

SEQ ID NO: 2756 - RNA, 19 nt, synthetic construct
  misc_feature 1..19: note = Description of Artificial Sequence: Synthetic oligonucleotide
  source 1..19: mol_type = other RNA
agatgtgcactgagggact

SEQ ID NO: 2757 - RNA, 19 nt, synthetic construct
  misc_feature 1..19: note = Description of Artificial Sequence: Synthetic oligonucleotide
  source 1..19: mol_type = other RNA
gatgtgcactgagggactg

SEQ ID NO: 2758 - RNA, 19 nt, synthetic construct
  misc_feature 1..19: note = Description of Artificial Sequence: Synthetic oligonucleotide
  source 1..19: mol_type = other RNA
atgtgcactgagggactgt

SEQ ID NO: 2759 - RNA, 19 nt, synthetic construct
  misc_feature 1..19: note = Description of Artificial Sequence: Synthetic oligonucleotide
  source 1..19: mol_type = other RNA
tgtgcactgagggactgtt

SEQ ID NO: 2760 - RNA, 19 nt, synthetic construct
  misc_feature 1..19: note = Description of Artificial Sequence: Synthetic oligonucleotide
  source 1..19: mol_type = other RNA
gtgcactgagggactgttg

SEQ ID NO: 2761 - RNA, 19 nt, synthetic construct
  misc_feature 1..19: note = Description of Artificial Sequence: Synthetic oligonucleotide
  source 1..19: mol_type = other RNA
tgcactgagggactgttgg

SEQ ID NO: 2762 - RNA, 19 nt, synthetic construct
  misc_feature 1..19: note = Description of Artificial Sequence: Synthetic oligonucleotide
  source 1..19: mol_type = other RNA
gcactgagggactgttggc

SEQ ID NO: 2763 - RNA, 19 nt, synthetic construct
  misc_feature 1..19: note = Description of Artificial Sequence: Synthetic oligonucleotide
  source 1..19: mol_type = other RNA
cactgagggactgttggcc

SEQ ID NO: 2764 - RNA, 19 nt, synthetic construct
  misc_feature 1..19: note = Description of Artificial Sequence: Synthetic oligonucleotide
  source 1..19: mol_type = other RNA
actgagggactgttggccc

SEQ ID NO: 2765 - RNA, 19 nt, synthetic construct
  misc_feature 1..19: note = Description of Artificial Sequence: Synthetic oligonucleotide
  source 1..19: mol_type = other RNA
ctgagggactgttggcccc

SEQ ID NO: 2766 - RNA, 19 nt, synthetic construct
  misc_feature 1..19: note = Description of Artificial Sequence: Synthetic oligonucleotide
  source 1..19: mol_type = other RNA
tgagggactgttggcccct

SEQ ID NO: 2767 - RNA, 19 nt, synthetic construct
  misc_feature 1..19: note = Description of Artificial Sequence: Synthetic oligonucleotide
  source 1..19: mol_type = other RNA
gagggactgttggcccctg

SEQ ID NO: 2768 - RNA, 19 nt, synthetic construct
  misc_feature 1..19: note = Description of Artificial Sequence: Synthetic oligonucleotide
  source 1..19: mol_type = other RNA
agggactgttggcccctgt

SEQ ID NO: 2769 - RNA, 19 nt, synthetic construct
  misc_feature 1..19: note = Description of Artificial Sequence: Synthetic oligonucleotide
  source 1..19: mol_type = other RNA
gggactgttggcccctgtg

SEQ ID NO: 2770 - RNA, 19 nt, synthetic construct
  misc_feature 1..19: note = Description of Artificial Sequence: Synthetic oligonucleotide
  source 1..19: mol_type = other RNA
ggactgttggcccctgtgg

SEQ ID NO: 2771 - RNA, 19 nt, synthetic construct
  misc_feature 1..19: note = Description of Artificial Sequence: Synthetic oligonucleotide
  source 1..19: mol_type = other RNA
gactgttggcccctgtggg

SEQ ID NO: 2772 - RNA, 19 nt, synthetic construct
  misc_feature 1..19: note = Description of Artificial Sequence: Synthetic oligonucleotide
  source 1..19: mol_type = other RNA
actgttggcccctgtgggg

SEQ ID NO: 2773 - RNA, 19 nt, synthetic construct
  misc_feature 1..19: note = Description of Artificial Sequence: Synthetic oligonucleotide
  source 1..19: mol_type = other RNA
ctgttggcccctgtggggg

SEQ ID NO: 2774 - RNA, 19 nt, synthetic construct
  misc_feature 1..19: note = Description of Artificial Sequence: Synthetic oligonucleotide
  source 1..19: mol_type = other RNA
tgttggcccctgtgggggc

SEQ ID NO: 2775 - RNA, 19 nt, synthetic construct
  misc_feature 1..19: note = Description of Artificial Sequence: Synthetic oligonucleotide
  source 1..19: mol_type = other RNA
gttggcccctgtgggggcc

SEQ ID NO: 2776 - RNA, 19 nt, synthetic construct
  misc_feature 1..19: note = Description of Artificial Sequence: Synthetic oligonucleotide
  source 1..19: mol_type = other RNA
ttggcccctgtgggggcct

SEQ ID NO: 2777 - RNA, 19 nt, synthetic construct
  misc_feature 1..19: note = Description of Artificial Sequence: Synthetic oligonucleotide
  source 1..19: mol_type = other RNA
tggcccctgtgggggcctg

SEQ ID NO: 2778 - RNA, 19 nt, synthetic construct
  misc_feature 1..19: note = Description of Artificial Sequence: Synthetic oligonucleotide
  source 1..19: mol_type = other RNA
ggcccctgtgggggcctgt

SEQ ID NO: 2779 - RNA, 19 nt, synthetic construct
  misc_feature 1..19: note = Description of Artificial Sequence: Synthetic oligonucleotide
  source 1..19: mol_type = other RNA
gcccctgtgggggcctgtg

SEQ ID NO: 2780 - RNA, 19 nt, synthetic construct
  misc_feature 1..19: note = Description of Artificial Sequence: Synthetic oligonucleotide
  source 1..19: mol_type = other RNA
cccctgtgggggcctgtga

SEQ ID NO: 2781 - RNA, 19 nt, synthetic construct
  misc_feature 1..19: note = Description of Artificial Sequence: Synthetic oligonucleotide
  source 1..19: mol_type = other RNA
ccctgtgggggcctgtgag

SEQ ID NO: 2782 - RNA, 19 nt, synthetic construct
  misc_feature 1..19: note = Description of Artificial Sequence: Synthetic oligonucleotide
  source 1..19: mol_type = other RNA
cctgtgggggcctgtgagg

SEQ ID NO: 2783 - RNA, 19 nt, synthetic construct
  misc_feature 1..19: note = Description of Artificial Sequence: Synthetic oligonucleotide
  source 1..19: mol_type = other RNA
ctgtgggggcctgtgaggg

SEQ ID NO: 2784 - RNA, 19 nt, synthetic construct
  misc_feature 1..19: note = Description of Artificial Sequence: Synthetic oligonucleotide
  source 1..19: mol_type = other RNA
tgtgggggcctgtgagggt

SEQ ID NO: 2785 - RNA, 19 nt, synthetic construct
  misc_feature 1..19: note = Description of Artificial Sequence: Synthetic oligonucleotide
  source 1..19: mol_type = other RNA
gtgggggcctgtgagggtg

SEQ ID NO: 2786 - RNA, 19 nt, synthetic construct
  misc_feature 1..19: note = Description of Artificial Sequence: Synthetic oligonucleotide
  source 1..19: mol_type = other RNA
tgggggcctgtgagggtga

SEQ ID NO: 2787 - RNA, 19 nt, synthetic construct
  misc_feature 1..19: note = Description of Artificial Sequence: Synthetic oligonucleotide
  source 1..19: mol_type = other RNA
gggggcctgtgagggtgac

SEQ ID NO: 2788 - RNA, 19 nt, synthetic construct
  misc_feature 1..19: note = Description of Artificial Sequence: Synthetic oligonucleotide
  source 1..19: mol_type = other RNA
ggggcctgtgagggtgact

SEQ ID NO: 2789 - RNA, 19 nt, synthetic construct
  misc_feature 1..19: note = Description of Artificial Sequence: Synthetic oligonucleotide
  source 1..19: mol_type = other RNA
gggcctgtgagggtgacta

SEQ ID NO: 2790 - RNA, 19 nt, synthetic construct
  misc_feature 1..19: note = Description of Artificial Sequence: Synthetic oligonucleotide
  source 1..19: mol_type = other RNA
ggcctgtgagggtgactac

SEQ ID NO: 2791 - RNA, 19 nt, synthetic construct
  misc_feature 1..19: note = Description of Artificial Sequence: Synthetic oligonucleotide
  source 1..19: mol_type = other RNA
gcctgtgagggtgactacg

SEQ ID NO: 2792 - RNA, 19 nt, synthetic construct
  misc_feature 1..19: note = Description of Artificial Sequence: Synthetic oligonucleotide
  source 1..19: mol_type = other RNA
cctgtgagggtgactacgg

SEQ ID NO: 2793 - RNA, 19 nt, synthetic construct
  misc_feature 1..19: note = Description of Artificial Sequence: Synthetic oligonucleotide
  source 1..19: mol_type = other RNA
ctgtgagggtgactacggg

SEQ ID NO: 2794 - RNA, 19 nt, synthetic construct
  misc_feature 1..19: note = Description of Artificial Sequence: Synthetic oligonucleotide
  source 1..19: mol_type = other RNA
tgtgagggtgactacgggg

SEQ ID NO: 2795 - RNA, 19 nt, synthetic construct
  misc_feature 1..19: note = Description of Artificial Sequence: Synthetic oligonucleotide
  source 1..19: mol_type = other RNA
gtgagggtgactacggggg

SEQ ID NO: 2796 - RNA, 19 nt, synthetic construct
  misc_feature 1..19: note = Description of Artificial Sequence: Synthetic oligonucleotide
  source 1..19: mol_type = other RNA
tgagggtgactacgggggc

SEQ ID NO: 2797 - RNA, 19 nt, synthetic construct
  misc_feature 1..19: note = Description of Artificial Sequence: Synthetic oligonucleotide
  source 1..19: mol_type = other RNA
gagggtgactacgggggcc

SEQ ID NO: 2798 - RNA, 19 nt, synthetic construct
  misc_feature 1..19: note = Description of Artificial Sequence: Synthetic oligonucleotide
  source 1..19: mol_type = other RNA
agggtgactacgggggccc

SEQ ID NO: 2799 - RNA, 19 nt, synthetic construct
  misc_feature 1..19: note = Description of Artificial Sequence: Synthetic oligonucleotide
  source 1..19: mol_type = other RNA
gggtgactacgggggccca

SEQ ID NO: 2800 - RNA, 19 nt, synthetic construct
  misc_feature 1..19: note = Description of Artificial Sequence: Synthetic oligonucleotide
  source 1..19: mol_type = other RNA
ggtgactacgggggcccac

SEQ ID NO: 2801 - RNA, 19 nt, synthetic construct
  misc_feature 1..19: note = Description of Artificial Sequence: Synthetic oligonucleotide
  source 1..19: mol_type = other RNA
gtgactacgggggcccact

SEQ ID NO: 2802 - RNA, 19 nt, synthetic construct
  misc_feature 1..19: note = Description of Artificial Sequence: Synthetic oligonucleotide
  source 1..19: mol_type = other RNA
tgactacgggggcccactt

SEQ ID NO: 2803 - RNA, 19 nt, synthetic construct
  misc_feature 1..19: note = Description of Artificial Sequence: Synthetic oligonucleotide
  source 1..19: mol_type = other RNA
gactacgggggcccacttg

SEQ ID NO: 2804 - RNA, 19 nt, synthetic construct
  misc_feature 1..19: note = Description of Artificial Sequence: Synthetic oligonucleotide
  source 1..19: mol_type = other RNA
actacgggggcccacttgc

SEQ ID NO: 2805 - RNA, 19 nt, synthetic construct
  misc_feature 1..19: note = Description of Artificial Sequence: Synthetic oligonucleotide
  source 1..19: mol_type = other RNA
ctacgggggcccacttgcc

SEQ ID NO: 2806 - RNA, 19 nt, synthetic construct
  misc_feature 1..19: note = Description of Artificial Sequence: Synthetic oligonucleotide
  source 1..19: mol_type = other RNA
tacgggggcccacttgcct

SEQ ID NO: 2807 - RNA, 19 nt, synthetic construct
  misc_feature 1..19: note = Description of Artificial Sequence: Synthetic oligonucleotide
  source 1..19: mol_type = other RNA
acgggggcccacttgcctg

SEQ ID NO: 2808 - RNA, 19 nt, synthetic construct
  misc_feature 1..19: note = Description of Artificial Sequence: Synthetic oligonucleotide
  source 1..19: mol_type = other RNA
cgggggcccacttgcctgc

SEQ ID NO: 2809 - RNA, 19 nt, synthetic construct
  misc_feature 1..19: note = Description of Artificial Sequence: Synthetic oligonucleotide
  source 1..19: mol_type = other RNA
gggggcccacttgcctgct

SEQ ID NO: 2810 - RNA, 19 nt, synthetic construct
  misc_feature 1..19: note = Description of Artificial Sequence: Synthetic oligonucleotide
  source 1..19: mol_type = other RNA
ggggcccacttgcctgctt

SEQ ID NO: 2811 - RNA, 19 nt, synthetic construct
  misc_feature 1..19: note = Description of Artificial Sequence: Synthetic oligonucleotide
  source 1..19: mol_type = other RNA
gggcccacttgcctgcttt

SEQ ID NO: 2812 - RNA, 19 nt, synthetic construct
  misc_feature 1..19: note = Description of Artificial Sequence: Synthetic oligonucleotide
  source 1..19: mol_type = other RNA
ggcccacttgcctgcttta

SEQ ID NO: 2813 - RNA, 19 nt, synthetic construct
  misc_feature 1..19: note = Description of Artificial Sequence: Synthetic oligonucleotide
  source 1..19: mol_type = other RNA
gcccacttgcctgctttac

SEQ ID NO: 2814 - RNA, 19 nt, synthetic construct
  misc_feature 1..19: note = Description of Artificial Sequence: Synthetic oligonucleotide
  source 1..19: mol_type = other RNA
cccacttgcctgctttacc

SEQ ID NO: 2815 - RNA, 19 nt, synthetic construct
  misc_feature 1..19: note = Description of Artificial Sequence: Synthetic oligonucleotide
  source 1..19: mol_type = other RNA
ccacttgcctgctttaccc

SEQ ID NO: 2816 - RNA, 19 nt, synthetic construct
  misc_feature 1..19: note = Description of Artificial Sequence: Synthetic oligonucleotide
  source 1..19: mol_type = other RNA
cacttgcctgctttaccca

SEQ ID NO: 2817 - RNA, 19 nt, synthetic construct
  misc_feature 1..19: note = Description of Artificial Sequence: Synthetic oligonucleotide
  source 1..19: mol_type = other RNA
acttgcctgctttacccac

SEQ ID NO: 2818 - RNA, 19 nt, synthetic construct
  misc_feature 1..19: note = Description of Artificial Sequence: Synthetic oligonucleotide
  source 1..19: mol_type = other RNA
cttgcctgctttacccaca

SEQ ID NO: 2819 - RNA, 19 nt, synthetic construct
  misc_feature 1..19: note = Description of Artificial Sequence: Synthetic oligonucleotide
  source 1..19: mol_type = other RNA
ttgcctgctttacccacaa

SEQ ID NO: 2820 - RNA, 19 nt, synthetic construct
  misc_feature 1..19: note = Description of Artificial Sequence: Synthetic oligonucleotide
  source 1..19: mol_type = other RNA
tgcctgctttacccacaac

SEQ ID NO: 2821 - RNA, 19 nt, synthetic construct
  misc_feature 1..19: note = Description of Artificial Sequence: Synthetic oligonucleotide
  source 1..19: mol_type = other RNA
gcctgctttacccacaact

SEQ ID NO: 2822 - RNA, 19 nt, synthetic construct
  misc_feature 1..19: note = Description of Artificial Sequence: Synthetic oligonucleotide
  source 1..19: mol_type = other RNA
cctgctttacccacaactg

SEQ ID NO: 2823 - RNA, 19 nt, synthetic construct
  misc_feature 1..19: note = Description of Artificial Sequence: Synthetic oligonucleotide
  source 1..19: mol_type = other RNA
ctgctttacccacaactgc

SEQ ID NO: 2824 - RNA, 19 nt, synthetic construct
  misc_feature 1..19: note = Description of Artificial Sequence: Synthetic oligonucleotide
  source 1..19: mol_type = other RNA
tgctttacccacaactgct

SEQ ID NO: 2825 - RNA, 19 nt, synthetic construct
  misc_feature 1..19: note = Description of Artificial Sequence: Synthetic oligonucleotide
  source 1..19: mol_type = other RNA
gctttacccacaactgctg

SEQ ID NO: 2826 - RNA, 19 nt, synthetic construct
  misc_feature 1..19: note = Description of Artificial Sequence: Synthetic oligonucleotide
  source 1..19: mol_type = other RNA
ctttacccacaactgctgg

SEQ ID NO: 2827 - RNA, 19 nt, synthetic construct
  misc_feature 1..19: note = Description of Artificial Sequence: Synthetic oligonucleotide
  source 1..19: mol_type = other RNA
tttacccacaactgctggg

SEQ ID NO: 2828 - RNA, 19 nt, synthetic construct
  misc_feature 1..19: note = Description of Artificial Sequence: Synthetic oligonucleotide
  source 1..19: mol_type = other RNA
ttacccacaactgctgggt

SEQ ID NO: 2829 - RNA, 19 nt, synthetic construct
  misc_feature 1..19: note = Description of Artificial Sequence: Synthetic oligonucleotide
  source 1..19: mol_type = other RNA
tacccacaactgctgggtc

SEQ ID NO: 2830 - RNA, 19 nt, synthetic construct
  misc_feature 1..19: note = Description of Artificial Sequence: Synthetic oligonucleotide
  source 1..19: mol_type = other RNA
acccacaactgctgggtcc

SEQ ID NO: 2831 - RNA, 19 nt, synthetic construct
  misc_feature 1..19: note = Description of Artificial Sequence: Synthetic oligonucleotide
  source 1..19: mol_type = other RNA
cccacaactgctgggtcct

SEQ ID NO: 2832 - RNA, 19 nt, synthetic construct
  misc_feature 1..19: note = Description of Artificial Sequence: Synthetic oligonucleotide
  source 1..19: mol_type = other RNA
ccacaactgctgggtcctg

SEQ ID NO: 2833 - RNA, 19 nt, synthetic construct
  misc_feature 1..19: note = Description of Artificial Sequence: Synthetic oligonucleotide
  source 1..19: mol_type = other RNA
cacaactgctgggtcctgg

SEQ ID NO: 2834 - RNA, 19 nt, synthetic construct
  misc_feature 1..19: note = Description of Artificial Sequence: Synthetic oligonucleotide
  source 1..19: mol_type = other RNA
acaactgctgggtcctgga

SEQ ID NO: 2835 - RNA, 19 nt, synthetic construct
  misc_feature 1..19: note = Description of Artificial Sequence: Synthetic oligonucleotide
  source 1..19: mol_type = other RNA
caactgctgggtcctggaa

SEQ ID NO: 2836 - RNA, 19 nt, synthetic construct
  misc_feature 1..19: note = Description of Artificial Sequence: Synthetic oligonucleotide
  source 1..19: mol_type = other RNA
aactgctgggtcctggaag

SEQ ID NO: 2837 - RNA, 19 nt, synthetic construct
  misc_feature 1..19: note = Description of Artificial Sequence: Synthetic oligonucleotide
  source 1..19: mol_type = other RNA
actgctgggtcctggaagg

SEQ ID NO: 2838 - RNA, 19 nt, synthetic construct
  misc_feature 1..19: note = Description of Artificial Sequence: Synthetic oligonucleotide
  source 1..19: mol_type = other RNA
ctgctgggtcctggaagga

SEQ ID NO: 2839 - RNA, 19 nt, synthetic construct
  misc_feature 1..19: note = Description of Artificial Sequence: Synthetic oligonucleotide
  source 1..19: mol_type = other RNA
tgctgggtcctggaaggaa

SEQ ID NO: 2840 - RNA, 19 nt, synthetic construct
  misc_feature 1..19: note = Description of Artificial Sequence: Synthetic oligonucleotide
  source 1..19: mol_type = other RNA
gctgggtcctggaaggaat

SEQ ID NO: 2841 - RNA, 19 nt, synthetic construct
  misc_feature 1..19: note = Description of Artificial Sequence: Synthetic oligonucleotide
  source 1..19: mol_type = other RNA
ctgggtcctggaaggaatt

SEQ ID NO: 2842 - RNA, 19 nt, synthetic construct
  misc_feature 1..19: note = Description of Artificial Sequence: Synthetic oligonucleotide
  source 1..19: mol_type = other RNA
tgggtcctggaaggaatta

SEQ ID NO: 2843 - RNA, 19 nt, synthetic construct
  misc_feature 1..19: note = Description of Artificial Sequence: Synthetic oligonucleotide
  source 1..19: mol_type = other RNA
gggtcctggaaggaattat

SEQ ID NO: 2844 - RNA, 19 nt, synthetic construct
  misc_feature 1..19: note = Description of Artificial Sequence: Synthetic oligonucleotide
  source 1..19: mol_type = other RNA
ggtcctggaaggaattata

SEQ ID NO: 2845 - RNA, 19 nt, synthetic construct
  misc_feature 1..19: note = Description of Artificial Sequence: Synthetic oligonucleotide
  source 1..19: mol_type = other RNA
gtcctggaaggaattataa

SEQ ID NO: 2846 - RNA, 19 nt, synthetic construct
  misc_feature 1..19: note = Description of Artificial Sequence: Synthetic oligonucleotide
  source 1..19: mol_type = other RNA
tcctggaaggaattataat

SEQ ID NO: 2847 - RNA, 19 nt, synthetic construct
  misc_feature 1..19: note = Description of Artificial Sequence: Synthetic oligonucleotide
  source 1..19: mol_type = other RNA
cctggaaggaattataatc

SEQ ID NO: 2848 - RNA, 19 nt, synthetic construct
  misc_feature 1..19: note = Description of Artificial Sequence: Synthetic oligonucleotide
  source 1..19: mol_type = other RNA
ctggaaggaattataatcc

SEQ ID NO: 2849 - RNA, 19 nt, synthetic construct
  misc_feature 1..19: note = Description of Artificial Sequence: Synthetic oligonucleotide
  source 1..19: mol_type = other RNA
tggaaggaattataatccc

SEQ ID NO: 2850 - RNA, 19 nt, synthetic construct
  misc_feature 1..19: note = Description of Artificial Sequence: Synthetic oligonucleotide
  source 1..19: mol_type = other RNA
ggaaggaattataatcccc

SEQ ID NO: 2851 - RNA, 19 nt, synthetic construct
  misc_feature 1..19: note = Description of Artificial Sequence: Synthetic oligonucleotide
  source 1..19: mol_type = other RNA
gaaggaattataatcccca

SEQ ID NO: 2852 - RNA, 19 nt, synthetic construct
  misc_feature 1..19: note = Description of Artificial Sequence: Synthetic oligonucleotide
  source 1..19: mol_type = other RNA
aaggaattataatccccaa

SEQ ID NO: 2853 - RNA, 19 nt, synthetic construct
  misc_feature 1..19: note = Description of Artificial Sequence: Synthetic oligonucleotide
  source 1..19: mol_type = other RNA
aggaattataatccccaac

SEQ ID NO: 2854 - RNA, 19 nt, synthetic construct
  misc_feature 1..19: note = Description of Artificial Sequence: Synthetic oligonucleotide
  source 1..19: mol_type = other RNA
ggaattataatccccaacc

SEQ ID NO: 2855 - RNA, 19 nt, synthetic construct
  misc_feature 1..19: note = Description of Artificial Sequence: Synthetic oligonucleotide
  source 1..19: mol_type = other RNA
gaattataatccccaaccg

SEQ ID NO: 2856 - RNA, 19 nt, synthetic construct
  misc_feature 1..19: note = Description of Artificial Sequence: Synthetic oligonucleotide
  source 1..19: mol_type = other RNA
aattataatccccaaccga

SEQ ID NO: 2857 - RNA, 19 nt, synthetic construct
  misc_feature 1..19: note = Description of Artificial Sequence: Synthetic oligonucleotide
  source 1..19: mol_type = other RNA
attataatccccaaccgag

SEQ ID NO: 2858 - RNA, 19 nt, synthetic construct
  misc_feature 1..19: note = Description of Artificial Sequence: Synthetic oligonucleotide
  source 1..19: mol_type = other RNA
ttataatccccaaccgagt

SEQ ID NO: 2859 - RNA, 19 nt, synthetic construct
  misc_feature 1..19: note = Description of Artificial Sequence: Synthetic oligonucleotide
  source 1..19: mol_type = other RNA
tataatccccaaccgagta

SEQ ID NO: 2860 - RNA, 19 nt, synthetic construct
  misc_feature 1..19: note = Description of Artificial Sequence: Synthetic oligonucleotide
  source 1..19: mol_type = other RNA
ataatccccaaccgagtat

SEQ ID NO: 2861 - RNA, 19 nt, synthetic construct
  misc_feature 1..19: note = Description of Artificial Sequence: Synthetic oligonucleotide
  source 1..19: mol_type = other RNA
taatccccaaccgagtatg

SEQ ID NO: 2862 - RNA, 19 nt, synthetic construct
  misc_feature 1..19: note = Description of Artificial Sequence: Synthetic oligonucleotide
  source 1..19: mol_type = other RNA
aatccccaaccgagtatgc

SEQ ID NO: 2863 - RNA, 19 nt, synthetic construct
  misc_feature 1..19: note = Description of Artificial Sequence: Synthetic oligonucleotide
  source 1..19: mol_type = other RNA
atccccaaccgagtatgcg

SEQ ID NO: 2864 - RNA, 19 nt, synthetic construct
  misc_feature 1..19: note = Description of Artificial Sequence: Synthetic oligonucleotide
  source 1..19: mol_type = other RNA
tccccaaccgagtatgcgc

SEQ ID NO: 2865 - RNA, 19 nt, synthetic construct
  misc_feature 1..19: note = Description of Artificial Sequence: Synthetic oligonucleotide
  source 1..19: mol_type = other RNA
ccccaaccgagtatgcgca

SEQ ID NO: 2866 - RNA, 19 nt, synthetic construct
  misc_feature 1..19: note = Description of Artificial Sequence: Synthetic oligonucleotide
  source 1..19: mol_type = other RNA
cccaaccgagtatgcgcaa

SEQ ID NO: 2867 - RNA, 19 nt, synthetic construct
  misc_feature 1..19: note = Description of Artificial Sequence: Synthetic oligonucleotide
  source 1..19: mol_type = other RNA
ccaaccgagtatgcgcaag

SEQ ID NO: 2868 - RNA, 19 nt, synthetic construct
  misc_feature 1..19: note = Description of Artificial Sequence: Synthetic oligonucleotide
  source 1..19: mol_type = other RNA
caaccgagtatgcgcaagg

SEQ ID NO: 2869 - RNA, 19 nt, synthetic construct
  misc_feature 1..19: note = Description of Artificial Sequence: Synthetic oligonucleotide
  source 1..19: mol_type = other RNA
aaccgagtatgcgcaaggt

SEQ ID NO: 2870 - RNA, 19 nt, synthetic construct
  misc_feature 1..19: note = Description of Artificial Sequence: Synthetic oligonucleotide
  source 1..19: mol_type = other RNA
accgagtatgcgcaaggtc

SEQ ID NO: 2871 - RNA, 19 nt, synthetic construct
  misc_feature 1..19: note = Description of Artificial Sequence: Synthetic oligonucleotide
  source 1..19: mol_type = other RNA
ccgagtatgcgcaaggtcc

SEQ ID NO: 2872 - RNA, 19 nt, synthetic construct
  misc_feature 1..19: note = Description of Artificial Sequence: Synthetic oligonucleotide
  source 1..19: mol_type = other RNA
cgagtatgcgcaaggtccc

SEQ ID NO: 2873 - RNA, 19 nt, synthetic construct
  misc_feature 1..19: note = Description of Artificial Sequence: Synthetic oligonucleotide
  source 1..19: mol_type = other RNA
gagtatgcgcaaggtcccg

SEQ ID NO: 2874 - RNA, 19 nt, synthetic construct
  misc_feature 1..19: note = Description of Artificial Sequence: Synthetic oligonucleotide
  source 1..19: mol_type = other RNA
agtatgcgcaaggtcccgc

SEQ ID NO: 2875 - RNA, 19 nt, synthetic construct
  misc_feature 1..19: note = Description of Artificial Sequence: Synthetic oligonucleotide
  source 1..19: mol_type = other RNA
gtatgcgcaaggtcccgct

SEQ ID NO: 2876 - RNA, 19 nt, synthetic construct
  misc_feature 1..19: note = Description of Artificial Sequence: Synthetic oligonucleotide
  source 1..19: mol_type = other RNA
tatgcgcaaggtcccgctg

SEQ ID NO: 2877 - RNA, 19 nt, synthetic construct
  misc_feature 1..19: note = Description of Artificial Sequence: Synthetic oligonucleotide
  source 1..19: mol_type = other RNA
atgcgcaaggtcccgctgg

SEQ ID NO: 2878 - RNA, 19 nt, synthetic construct
  misc_feature 1..19: note = Description of Artificial Sequence: Synthetic oligonucleotide
  source 1..19: mol_type = other RNA
tgcgcaaggtcccgctggc

SEQ ID NO: 2879 - RNA, 19 nt, synthetic construct
  misc_feature 1..19: note = Description of Artificial Sequence: Synthetic oligonucleotide
  source 1..19: mol_type = other RNA
gcgcaaggtcccgctggcc

SEQ ID NO: 2880 - RNA, 19 nt, synthetic construct
  misc_feature 1..19: note = Description of Artificial Sequence: Synthetic oligonucleotide
  source 1..19: mol_type = other RNA
cgcaaggtcccgctggcca

SEQ ID NO: 2881 - RNA, 19 nt, synthetic construct
  misc_feature 1..19: note = Description of Artificial Sequence: Synthetic oligonucleotide
  source 1..19: mol_type = other RNA
gcaaggtcccgctggccag

SEQ ID NO: 2882 - RNA, 19 nt, synthetic construct
  misc_feature 1..19: note = Description of Artificial Sequence: Synthetic oligonucleotide
  source 1..19: mol_type = other RNA
caaggtcccgctggccagc

SEQ ID NO: 2883 - RNA, 19 nt, synthetic construct
  misc_feature 1..19: note = Description of Artificial Sequence: Synthetic oligonucleotide
  source 1..19: mol_type = other RNA
aaggtcccgctggccagct

SEQ ID NO: 2884 - RNA, 19 nt, synthetic construct
  misc_feature 1..19: note = Description of Artificial Sequence: Synthetic oligonucleotide
  source 1..19: mol_type = other RNA
aggtcccgctggccagctg

SEQ ID NO: 2885 - RNA, 19 nt, synthetic construct
  misc_feature 1..19: note = Description of Artificial Sequence: Synthetic oligonucleotide
  source 1..19: mol_type = other RNA
ggtcccgctggccagctgt

SEQ ID NO: 2886 - RNA, 19 nt, synthetic construct
  misc_feature 1..19: note = Description of Artificial Sequence: Synthetic oligonucleotide
  source 1..19: mol_type = other RNA
gtcccgctggccagctgtc

SEQ ID NO: 2887 - RNA, 19 nt, synthetic construct
  misc_feature 1..19: note = Description of Artificial Sequence: Synthetic oligonucleotide
  source 1..19: mol_type = other RNA
tcccgctggccagctgtct

SEQ ID NO: 2888 - RNA, 19 nt, synthetic construct
  misc_feature 1..19: note = Description of Artificial Sequence: Synthetic oligonucleotide
  source 1..19: mol_type = other RNA
cccgctggccagctgtctt

SEQ ID NO: 2889 - RNA, 19 nt, synthetic construct
  misc_feature 1..19: note = Description of Artificial Sequence: Synthetic oligonucleotide
  source 1..19: mol_type = other RNA
ccgctggccagctgtcttc

SEQ ID NO: 2890 - RNA, 19 nt, synthetic construct
  misc_feature 1..19: note = Description of Artificial Sequence: Synthetic oligonucleotide
  source 1..19: mol_type = other RNA
cgctggccagctgtcttca

SEQ ID NO: 2891 - RNA, 19 nt, synthetic construct
  misc_feature 1..19: note = Description of Artificial Sequence: Synthetic oligonucleotide
  source 1..19: mol_type = other RNA
gctggccagctgtcttcac

SEQ ID NO: 2892 - RNA, 19 nt, synthetic construct
  misc_feature 1..19: note = Description of Artificial Sequence: Synthetic oligonucleotide
  source 1..19: mol_type = other RNA
ctggccagctgtcttcacg

SEQ ID NO: 2893 - RNA, 19 nt, synthetic construct
  misc_feature 1..19: note = Description of Artificial Sequence: Synthetic oligonucleotide
  source 1..19: mol_type = other RNA
tggccagctgtcttcacgc

SEQ ID NO: 2894 - RNA, 19 nt, synthetic construct
  misc_feature 1..19: note = Description of Artificial Sequence: Synthetic oligonucleotide
  source 1..19: mol_type = other RNA
ggccagctgtcttcacgcg

SEQ ID NO: 2895 - RNA, 19 nt, synthetic construct
  misc_feature 1..19: note = Description of Artificial Sequence: Synthetic oligonucleotide
  source 1..19: mol_type = other RNA
gccagctgtcttcacgcgt

SEQ ID NO: 2896 - RNA, 19 nt, synthetic construct
  misc_feature 1..19: note = Description of Artificial Sequence: Synthetic oligonucleotide
  source 1..19: mol_type = other RNA
ccagctgtcttcacgcgtg

SEQ ID NO: 2897 - RNA, 19 nt, synthetic construct
  misc_feature 1..19: note = Description of Artificial Sequence: Synthetic oligonucleotide
  source 1..19: mol_type = other RNA
cagctgtcttcacgcgtgt

SEQ ID NO: 2898 - RNA, 19 nt, synthetic construct
  misc_feature 1..19: note = Description of Artificial Sequence: Synthetic oligonucleotide
  source 1..19: mol_type = other RNA
agctgtcttcacgcgtgtc

SEQ ID NO: 2899 - RNA, 19 nt, synthetic construct
  misc_feature 1..19: note = Description of Artificial Sequence: Synthetic oligonucleotide
  source 1..19: mol_type = other RNA
gctgtcttcacgcgtgtct

SEQ ID NO: 2900 - RNA, 19 nt, synthetic construct
  misc_feature 1..19: note = Description of Artificial Sequence: Synthetic oligonucleotide
  source 1..19: mol_type = other RNA
ctgtcttcacgcgtgtctc

SEQ ID NO: 2901 - RNA, 19 nt, synthetic construct
  misc_feature 1..19: note = Description of Artificial Sequence: Synthetic oligonucleotide
  source 1..19: mol_type = other RNA
tgtcttcacgcgtgtctct

SEQ ID NO: 2902 - RNA, 19 nt, synthetic construct
  misc_feature 1..19: note = Description of Artificial Sequence: Synthetic oligonucleotide
  source 1..19: mol_type = other RNA
gtcttcacgcgtgtctctg

SEQ ID NO: 2903 - RNA, 19 nt, synthetic construct
  misc_feature 1..19: note = Description of Artificial Sequence: Synthetic oligonucleotide
  source 1..19: mol_type = other RNA
tcttcacgcgtgtctctgt

SEQ ID NO: 2904 - RNA, 19 nt, synthetic construct
  misc_feature 1..19: note = Description of Artificial Sequence: Synthetic oligonucleotide
  source 1..19: mol_type = other RNA
cttcacgcgtgtctctgtg

SEQ ID NO: 2905 - RNA, 19 nt, synthetic construct
  misc_feature 1..19: note = Description of Artificial Sequence: Synthetic oligonucleotide
  source 1..19: mol_type = other RNA
ttcacgcgtgtctctgtgt

SEQ ID NO: 2906 - RNA, 19 nt, synthetic construct
  misc_feature 1..19: note = Description of Artificial Sequence: Synthetic oligonucleotide
  source 1..19: mol_type = other RNA
tcacgcgtgtctctgtgtt

SEQ ID NO: 2907 - RNA, 19 nt, synthetic construct
  misc_feature 1..19: note = Description of Artificial Sequence: Synthetic oligonucleotide
  source 1..19: mol_type = other RNA
cacgcgtgtctctgtgttt

SEQ ID NO: 2908 - RNA, 19 nt, synthetic construct
  misc_feature 1..19: note = Description of Artificial Sequence: Synthetic oligonucleotide
  source 1..19: mol_type = other RNA
acgcgtgtctctgtgtttg

SEQ ID NO: 2909 - RNA, 19 nt, synthetic construct
  misc_feature 1..19: note = Description of Artificial Sequence: Synthetic oligonucleotide
  source 1..19: mol_type = other RNA
cgcgtgtctctgtgtttgt

SEQ ID NO: 2910 - RNA, 19 nt, synthetic construct
  misc_feature 1..19: note = Description of Artificial Sequence: Synthetic oligonucleotide
  source 1..19: mol_type = other RNA
gcgtgtctctgtgtttgtg

SEQ ID NO: 2911 - RNA, 19 nt, synthetic construct
  misc_feature 1..19: note = Description of Artificial Sequence: Synthetic oligonucleotide
  source 1..19: mol_type = other RNA
cgtgtctctgtgtttgtgg

SEQ ID NO: 2912 - RNA, 19 nt, synthetic construct
  misc_feature 1..19: note = Description of Artificial Sequence: Synthetic oligonucleotide
  source 1..19: mol_type = other RNA
gtgtctctgtgtttgtgga

SEQ ID NO: 2913 - RNA, 19 nt, synthetic construct
  misc_feature 1..19: note = Description of Artificial Sequence: Synthetic oligonucleotide
  source 1..19: mol_type = other RNA
tgtctctgtgtttgtggac

SEQ ID NO: 2914 - RNA, 19 nt, synthetic construct
  misc_feature 1..19: note = Description of Artificial Sequence: Synthetic oligonucleotide
  source 1..19: mol_type = other RNA
gtctctgtgtttgtggact

SEQ ID NO: 2915 - RNA, 19 nt, synthetic construct
  misc_feature 1..19: note = Description of Artificial Sequence: Synthetic oligonucleotide
  source 1..19: mol_type = other RNA
tctctgtgtttgtggactg

SEQ ID NO: 2916 - RNA, 19 nt, synthetic construct
  misc_feature 1..19: note = Description of Artificial Sequence: Synthetic oligonucleotide
  source 1..19: mol_type = other RNA
ctctgtgtttgtggactgg

SEQ ID NO: 2917 - RNA, 19 nt, synthetic construct
  misc_feature 1..19: note = Description of Artificial Sequence: Synthetic oligonucleotide
  source 1..19: mol_type = other RNA
tctgtgtttgtggactgga

SEQ ID NO: 2918 - RNA, 19 nt, synthetic construct
  misc_feature 1..19: note = Description of Artificial Sequence: Synthetic oligonucleotide
  source 1..19: mol_type = other RNA
ctgtgtttgtggactggat

SEQ ID NO: 2919 - RNA, 19 nt, synthetic construct
  misc_feature 1..19: note = Description of Artificial Sequence: Synthetic oligonucleotide
  source 1..19: mol_type = other RNA
tgtgtttgtggactggatt

SEQ ID NO: 2920 - RNA, 19 nt, synthetic construct
  misc_feature 1..19: note = Description of Artificial Sequence: Synthetic oligonucleotide
  source 1..19: mol_type = other RNA
gtgtttgtggactggattc

SEQ ID NO: 2921 - RNA, 19 nt, synthetic construct
  misc_feature 1..19: note = Description of Artificial Sequence: Synthetic oligonucleotide
  source 1..19: mol_type = other RNA
tgtttgtggactggattca

SEQ ID NO: 2922 - RNA, 19 nt, synthetic construct
  misc_feature 1..19: note = Description of Artificial Sequence: Synthetic oligonucleotide
  source 1..19: mol_type = other RNA
gtttgtggactggattcac

SEQ ID NO: 2923 - RNA, 19 nt, synthetic construct
  misc_feature 1..19: note = Description of Artificial Sequence: Synthetic oligonucleotide
  source 1..19: mol_type = other RNA
tttgtggactggattcaca

SEQ ID NO: 2924 - RNA, 19 nt, synthetic construct
  misc_feature 1..19: note = Description of Artificial Sequence: Synthetic oligonucleotide
  source 1..19: mol_type = other RNA
ttgtggactggattcacaa

SEQ ID NO: 2925 - RNA, 19 nt, synthetic construct
  misc_feature 1..19: note = Description of Artificial Sequence: Synthetic oligonucleotide
  source 1..19: mol_type = other RNA
tgtggactggattcacaag

SEQ ID NO: 2926 - RNA, 19 nt, synthetic construct
  misc_feature 1..19: note = Description of Artificial Sequence: Synthetic oligonucleotide
  source 1..19: mol_type = other RNA
gtggactggattcacaagg

SEQ ID NO: 2927 - RNA, 19 nt, synthetic construct
  misc_feature 1..19: note = Description of Artificial Sequence: Synthetic oligonucleotide
  source 1..19: mol_type = other RNA
tggactggattcacaaggt

SEQ ID NO: 2928 - RNA, 19 nt, synthetic construct
  misc_feature 1..19: note = Description of Artificial Sequence: Synthetic oligonucleotide
  source 1..19: mol_type = other RNA
ggactggattcacaaggtc

SEQ ID NO: 2929 - RNA, 19 nt, synthetic construct
  misc_feature 1..19: note = Description of Artificial Sequence: Synthetic oligonucleotide
  source 1..19: mol_type = other RNA
gactggattcacaaggtca

SEQ ID NO: 2930 - RNA, 19 nt, synthetic construct
  misc_feature 1..19: note = Description of Artificial Sequence: Synthetic oligonucleotide
  source 1..19: mol_type = other RNA
actggattcacaaggtcat

SEQ ID NO: 2931 - RNA, 19 nt, synthetic construct
  misc_feature 1..19: note = Description of Artificial Sequence: Synthetic oligonucleotide
  source 1..19: mol_type = other RNA
ctggattcacaaggtcatg

SEQ ID NO: 2932 - RNA, 19 nt, synthetic construct
  misc_feature 1..19: note = Description of Artificial Sequence: Synthetic oligonucleotide
  source 1..19: mol_type = other RNA
tggattcacaaggtcatga

SEQ ID NO: 2933 - RNA, 19 nt, synthetic construct
  misc_feature 1..19: note = Description of Artificial Sequence: Synthetic oligonucleotide
  source 1..19: mol_type = other RNA
ggattcacaaggtcatgag

SEQ ID NO: 2934 - RNA, 19 nt, synthetic construct
  misc_feature 1..19: note = Description of Artificial Sequence: Synthetic oligonucleotide
  source 1..19: mol_type = other RNA
gattcacaaggtcatgaga

SEQ ID NO: 2935 - RNA, 19 nt, synthetic construct
  misc_feature 1..19: note = Description of Artificial Sequence: Synthetic oligonucleotide
  source 1..19: mol_type = other RNA
attcacaaggtcatgagac

SEQ ID NO: 2936 - RNA, 19 nt, synthetic construct
  misc_feature 1..19: note = Description of Artificial Sequence: Synthetic oligonucleotide
  source 1..19: mol_type = other RNA
ttcacaaggtcatgagact

SEQ ID NO: 2937 - RNA, 19 nt, synthetic construct
  misc_feature 1..19: note = Description of Artificial Sequence: Synthetic oligonucleotide
  source 1..19: mol_type = other RNA
tcacaaggtcatgagactg

SEQ ID NO: 2938 - RNA, 19 nt, synthetic construct
  misc_feature 1..19: note = Description of Artificial Sequence: Synthetic oligonucleotide
  source 1..19: mol_type = other RNA
cacaaggtcatgagactgg

SEQ ID NO: 2939 - RNA, 19 nt, synthetic construct
  misc_feature 1..19: note = Description of Artificial Sequence: Synthetic oligonucleotide
  source 1..19: mol_type = other RNA
acaaggtcatgagactggg

SEQ ID NO: 2940 - RNA, 19 nt, synthetic construct
  misc_feature 1..19: note = Description of Artificial Sequence: Synthetic oligonucleotide
  source 1..19: mol_type = other RNA
caaggtcatgagactgggt

SEQ ID NO: 2941 - RNA, 19 nt, synthetic construct
  misc_feature 1..19: note = Description of Artificial Sequence: Synthetic oligonucleotide
  source 1..19: mol_type = other RNA
aaggtcatgagactgggtt

SEQ ID NO: 2942 - RNA, 19 nt, synthetic construct
  misc_feature 1..19: note = Description of Artificial Sequence: Synthetic oligonucleotide
  source 1..19: mol_type = other RNA
aggtcatgagactgggtta

SEQ ID NO: 2943 - RNA, 19 nt, synthetic construct
  misc_feature 1..19: note = Description of Artificial Sequence: Synthetic oligonucleotide
  source 1..19: mol_type = other RNA
ggtcatgagactgggttag

SEQ ID NO: 2944 - RNA, 19 nt, synthetic construct
  misc_feature 1..19: note = Description of Artificial Sequence: Synthetic oligonucleotide
  source 1..19: mol_type = other RNA
gtcatgagactgggttagg

SEQ ID NO: 2945 - RNA, 19 nt, synthetic construct
  misc_feature 1..19: note = Description of Artificial Sequence: Synthetic oligonucleotide
  source 1..19: mol_type = other RNA
tcatgagactgggttaggc

SEQ ID NO: 2946 - RNA, 19 nt, synthetic construct
  misc_feature 1..19: note = Description of Artificial Sequence: Synthetic oligonucleotide
  source 1..19: mol_type = other RNA
catgagactgggttaggcc

SEQ ID NO: 2947 - RNA, 19 nt, synthetic construct
  misc_feature 1..19: note = Description of Artificial Sequence: Synthetic oligonucleotide
  source 1..19: mol_type = other RNA
atgagactgggttaggccc

SEQ ID NO: 2948 - RNA, 19 nt, synthetic construct
  misc_feature 1..19: note = Description of Artificial Sequence: Synthetic oligonucleotide
  source 1..19: mol_type = other RNA
tgagactgggttaggccca

SEQ ID NO: 2949 - RNA, 19 nt, synthetic construct
  misc_feature 1..19: note = Description of Artificial Sequence: Synthetic oligonucleotide
  source 1..19: mol_type = other RNA
gagactgggttaggcccag

SEQ ID NO: 2950 - RNA, 19 nt, synthetic construct
  misc_feature 1..19: note = Description of Artificial Sequence: Synthetic oligonucleotide
  source 1..19: mol_type = other RNA
agactgggttaggcccagc

SEQ ID NO: 2951 - RNA, 19 nt, synthetic construct
  misc_feature 1..19: note = Description of Artificial Sequence: Synthetic oligonucleotide
  source 1..19: mol_type = other RNA
gactgggttaggcccagcc

SEQ ID NO: 2952 - RNA, 19 nt, synthetic construct
  misc_feature 1..19: note = Description of Artificial Sequence: Synthetic oligonucleotide
  source 1..19: mol_type = other RNA
actgggttaggcccagcct

SEQ ID NO: 2953 - RNA, 19 nt, synthetic construct
  misc_feature 1..19: note = Description of Artificial Sequence: Synthetic oligonucleotide
  source 1..19: mol_type = other RNA
ctgggttaggcccagcctt

SEQ ID NO: 2954 - RNA, 19 nt, synthetic construct
  misc_feature 1..19: note = Description of Artificial Sequence: Synthetic oligonucleotide
  source 1..19: mol_type = other RNA
tgggttaggcccagccttg

SEQ ID NO: 2955 - RNA, 19 nt, synthetic construct
  misc_feature 1..19: note = Description of Artificial Sequence: Synthetic oligonucleotide
  source 1..19: mol_type = other RNA
gggttaggcccagccttga

SEQ ID NO: 2956 - RNA, 19 nt, synthetic construct
  misc_feature 1..19: note = Description of Artificial Sequence: Synthetic oligonucleotide
  source 1..19: mol_type = other RNA
ggttaggcccagccttgat

SEQ ID NO: 2957 - RNA, 19 nt, synthetic construct
  misc_feature 1..19: note = Description of Artificial Sequence: Synthetic oligonucleotide
  source 1..19: mol_type = other RNA
gttaggcccagccttgatg

SEQ ID NO: 2958 - RNA, 19 nt, synthetic construct
  misc_feature 1..19: note = Description of Artificial Sequence: Synthetic oligonucleotide
  source 1..19: mol_type = other RNA
ttaggcccagccttgatgc

SEQ ID NO: 2959 - RNA, 19 nt, synthetic construct
  misc_feature 1..19: note = Description of Artificial Sequence: Synthetic oligonucleotide
  source 1..19: mol_type = other RNA
taggcccagccttgatgcc

SEQ ID NO: 2960 - RNA, 19 nt, synthetic construct
  misc_feature 1..19: note = Description of Artificial Sequence: Synthetic oligonucleotide
  source 1..19: mol_type = other RNA
aggcccagccttgatgcca

SEQ ID NO: 2961 - RNA, 19 nt, synthetic construct
  misc_feature 1..19: note = Description of Artificial Sequence: Synthetic oligonucleotide
  source 1..19: mol_type = other RNA
ggcccagccttgatgccat

SEQ ID NO: 2962 - RNA, 19 nt, synthetic construct
  misc_feature 1..19: note = Description of Artificial Sequence: Synthetic oligonucleotide
  source 1..19: mol_type = other RNA
gcccagccttgatgccata

SEQ ID NO: 2963 - RNA, 19 nt, synthetic construct
  misc_feature 1..19: note = Description of Artificial Sequence: Synthetic oligonucleotide
  source 1..19: mol_type = other RNA
cccagccttgatgccatat

SEQ ID NO: 2964 - RNA, 19 nt, synthetic construct
  misc_feature 1..19: note = Description of Artificial Sequence: Synthetic oligonucleotide
  source 1..19: mol_type = other RNA
ccagccttgatgccatatg

SEQ ID NO: 2965 - RNA, 19 nt, synthetic construct
  misc_feature 1..19: note = Description of Artificial Sequence: Synthetic oligonucleotide
  source 1..19: mol_type = other RNA
cagccttgatgccatatgc

SEQ ID NO: 2966 - RNA, 19 nt, synthetic construct
  misc_feature 1..19: note = Description of Artificial Sequence: Synthetic oligonucleotide
  source 1..19: mol_type = other RNA
agccttgatgccatatgcc

SEQ ID NO: 2967 - RNA, 19 nt, synthetic construct
  misc_feature 1..19: note = Description of Artificial Sequence: Synthetic oligonucleotide
  source 1..19: mol_type = other RNA
gccttgatgccatatgcct

SEQ ID NO: 2968 - RNA, 19 nt, synthetic construct
  misc_feature 1..19: note = Description of Artificial Sequence: Synthetic oligonucleotide
  source 1..19: mol_type = other RNA
ccttgatgccatatgcctt

SEQ ID NO: 2969 - RNA, 19 nt, synthetic construct
  misc_feature 1..19: note = Description of Artificial Sequence: Synthetic oligonucleotide
  source 1..19: mol_type = other RNA
cttgatgccatatgccttg

SEQ ID NO: 2970 - RNA, 19 nt, synthetic construct
  misc_feature 1..19: note = Description of Artificial Sequence: Synthetic oligonucleotide
  source 1..19: mol_type = other RNA
ttgatgccatatgccttgg

SEQ ID NO: 2971 - RNA, 19 nt, synthetic construct
  misc_feature 1..19: note = Description of Artificial Sequence: Synthetic oligonucleotide
  source 1..19: mol_type = other RNA
tgatgccatatgccttggg

SEQ ID NO: 2972 - RNA, 19 nt, synthetic construct
  misc_feature 1..19: note = Description of Artificial Sequence: Synthetic oligonucleotide
  source 1..19: mol_type = other RNA
gatgccatatgccttgggg

SEQ ID NO: 2973 - RNA, 19 nt, synthetic construct
  misc_feature 1..19: note = Description of Artificial Sequence: Synthetic oligonucleotide
  source 1..19: mol_type = other RNA
atgccatatgccttgggga

SEQ ID NO: 2974 - RNA, 19 nt, synthetic construct
  misc_feature 1..19: note = Description of Artificial Sequence: Synthetic oligonucleotide
  source 1..19: mol_type = other RNA
tgccatatgccttggggag

SEQ ID NO: 2975 - RNA, 19 nt, synthetic construct
  misc_feature 1..19: note = Description of Artificial Sequence: Synthetic oligonucleotide
  source 1..19: mol_type = other RNA
gccatatgccttggggagg

SEQ ID NO: 2976 - RNA, 19 nt, synthetic construct
  misc_feature 1..19: note = Description of Artificial Sequence: Synthetic oligonucleotide
  source 1..19: mol_type = other RNA
ccatatgccttggggagga

SEQ ID NO: 2977 - RNA, 19 nt, synthetic construct
  misc_feature 1..19: note = Description of Artificial Sequence: Synthetic oligonucleotide
  source 1..19: mol_type = other RNA
catatgccttggggaggac

SEQ ID NO: 2978 - RNA, 19 nt, synthetic construct
  misc_feature 1..19: note = Description of Artificial Sequence: Synthetic oligonucleotide
  source 1..19: mol_type = other RNA
atatgccttggggaggaca

SEQ ID NO: 2979 - RNA, 19 nt, synthetic construct
  misc_feature 1..19: note = Description of Artificial Sequence: Synthetic oligonucleotide
  source 1..19: mol_type = other RNA
tatgccttggggaggacaa

SEQ ID NO: 2980 - RNA, 19 nt, synthetic construct
  misc_feature 1..19: note = Description of Artificial Sequence: Synthetic oligonucleotide
  source 1..19: mol_type = other RNA
atgccttggggaggacaaa

SEQ ID NO: 2981 - RNA, 19 nt, synthetic construct
  misc_feature 1..19: note = Description of Artificial Sequence: Synthetic oligonucleotide
  source 1..19: mol_type = other RNA
tgccttggggaggacaaaa

SEQ ID NO: 2982 - RNA, 19 nt, synthetic construct
  misc_feature 1..19: note = Description of Artificial Sequence: Synthetic oligonucleotide
  source 1..19: mol_type = other RNA
gccttggggaggacaaaac

SEQ ID NO: 2983 - RNA, 19 nt, synthetic construct
  misc_feature 1..19: note = Description of Artificial Sequence: Synthetic oligonucleotide
  source 1..19: mol_type = other RNA
ccttggggaggacaaaact

SEQ ID NO: 2984 - RNA, 19 nt, synthetic construct
  misc_feature 1..19: note = Description of Artificial Sequence: Synthetic oligonucleotide
  source 1..19: mol_type = other RNA
cttggggaggacaaaactt

SEQ ID NO: 2985 - RNA, 19 nt, synthetic construct
  misc_feature 1..19: note = Description of Artificial Sequence: Synthetic oligonucleotide
  source 1..19: mol_type = other RNA
ttggggaggacaaaacttc

SEQ ID NO: 2986 - RNA, 19 nt, synthetic construct
  misc_feature 1..19: note = Description of Artificial Sequence: Synthetic oligonucleotide
  source 1..19: mol_type = other RNA
tggggaggacaaaacttct

SEQ ID NO: 2987 - RNA, 19 nt, synthetic construct
  misc_feature 1..19: note = Description of Artificial Sequence: Synthetic oligonucleotide
  source 1..19: mol_type = other RNA
ggggaggacaaaacttctt

SEQ ID NO: 2988 - RNA, 19 nt, synthetic construct
  misc_feature 1..19: note = Description of Artificial Sequence: Synthetic oligonucleotide
  source 1..19: mol_type = other RNA
gggaggacaaaacttcttg

SEQ ID NO: 2989 - RNA, 19 nt, synthetic construct
  misc_feature 1..19: note = Description of Artificial Sequence: Synthetic oligonucleotide
  source 1..19: mol_type = other RNA
ggaggacaaaacttcttgt

SEQ ID NO: 2990 - RNA, 19 nt, synthetic construct
  misc_feature 1..19: note = Description of Artificial Sequence: Synthetic oligonucleotide
  source 1..19: mol_type = other RNA
gaggacaaaacttcttgtc

SEQ ID NO: 2991 - RNA, 19 nt, synthetic construct
  misc_feature 1..19: note = Description of Artificial Sequence: Synthetic oligonucleotide
  source 1..19: mol_type = other RNA
aggacaaaacttcttgtca

SEQ ID NO: 2992 - RNA, 19 nt, synthetic construct
  misc_feature 1..19: note = Description of Artificial Sequence: Synthetic oligonucleotide
  source 1..19: mol_type = other RNA
ggacaaaacttcttgtcag

SEQ ID NO: 2993 - RNA, 19 nt, synthetic construct
  misc_feature 1..19: note = Description of Artificial Sequence: Synthetic oligonucleotide
  source 1..19: mol_type = other RNA
gacaaaacttcttgtcaga

SEQ ID NO: 2994 - RNA, 19 nt, synthetic construct
  misc_feature 1..19: note = Description of Artificial Sequence: Synthetic oligonucleotide
  source 1..19: mol_type = other RNA
acaaaacttcttgtcagac

SEQ ID NO: 2995 - RNA, 19 nt, synthetic construct
  misc_feature 1..19: note = Description of Artificial Sequence: Synthetic oligonucleotide
  source 1..19: mol_type = other RNA
caaaacttcttgtcagaca

SEQ ID NO: 2996 - RNA, 19 nt, synthetic construct
  misc_feature 1..19: note = Description of Artificial Sequence: Synthetic oligonucleotide
  source 1..19: mol_type = other RNA
aaaacttcttgtcagacat

SEQ ID NO: 2997 - RNA, 19 nt, synthetic construct
  misc_feature 1..19: note = Description of Artificial Sequence: Synthetic oligonucleotide
  source 1..19: mol_type = other RNA
aaacttcttgtcagacata

SEQ ID NO: 2998 - RNA, 19 nt, synthetic construct
  misc_feature 1..19: note = Description of Artificial Sequence: Synthetic oligonucleotide
  source 1..19: mol_type = other RNA
aacttcttgtcagacataa

SEQ ID NO: 2999 - RNA, 19 nt, synthetic construct
  misc_feature 1..19: note = Description of Artificial Sequence: Synthetic oligonucleotide
  source 1..19: mol_type = other RNA
acttcttgtcagacataaa

SEQ ID NO: 3000 - RNA, 19 nt, synthetic construct
  misc_feature 1..19: note = Description of Artificial Sequence: Synthetic oligonucleotide
  source 1..19: mol_type = other RNA
cttcttgtcagacataaag

SEQ ID NO: 3001 - RNA, 19 nt, synthetic construct
  misc_feature 1..19: note = Description of Artificial Sequence: Synthetic oligonucleotide
  source 1..19: mol_type = other RNA
ttcttgtcagacataaagc

SEQ ID NO: 3002 - RNA, 19 nt, synthetic construct
  misc_feature 1..19: note = Description of Artificial Sequence: Synthetic oligonucleotide
  source 1..19: mol_type = other RNA
tcttgtcagacataaagcc

SEQ ID NO: 3003 - RNA, 19 nt, synthetic construct
  misc_feature 1..19: note = Description of Artificial Sequence: Synthetic oligonucleotide
  source 1..19: mol_type = other RNA
cttgtcagacataaagcca

SEQ ID NO: 3004 - RNA, 19 nt, synthetic construct
  misc_feature 1..19: note = Description of Artificial Sequence: Synthetic oligonucleotide
  source 1..19: mol_type = other RNA
ttgtcagacataaagccat

SEQ ID NO: 3005 - RNA, 19 nt, synthetic construct
  misc_feature 1..19: note = Description of Artificial Sequence: Synthetic oligonucleotide
  source 1..19: mol_type = other RNA
tgtcagacataaagccatg

SEQ ID NO: 3006 - RNA, 19 nt, synthetic construct
  misc_feature 1..19: note = Description of Artificial Sequence: Synthetic oligonucleotide
  source 1..19: mol_type = other RNA
gtcagacataaagccatgt

SEQ ID NO: 3007 - RNA, 19 nt, synthetic construct
  misc_feature 1..19: note = Description of Artificial Sequence: Synthetic oligonucleotide
  source 1..19: mol_type = other RNA
tcagacataaagccatgtt

SEQ ID NO: 3008 - RNA, 19 nt, synthetic construct
  misc_feature 1..19: note = Description of Artificial Sequence: Synthetic oligonucleotide
  source 1..19: mol_type = other RNA
cagacataaagccatgttt

SEQ ID NO: 3009 - RNA, 19 nt, synthetic construct
  misc_feature 1..19: note = Description of Artificial Sequence: Synthetic oligonucleotide
  source 1..19: mol_type = other RNA
agacataaagccatgtttc

SEQ ID NO: 3010 - RNA, 19 nt, synthetic construct
  misc_feature 1..19: note = Description of Artificial Sequence: Synthetic oligonucleotide
  source 1..19: mol_type = other RNA
gacataaagccatgtttcc

SEQ ID NO: 3011 - RNA, 19 nt, synthetic construct
  misc_feature 1..19: note = Description of Artificial Sequence: Synthetic oligonucleotide
  source 1..19: mol_type = other RNA
acataaagccatgtttcct

SEQ ID NO: 3012 - RNA, 19 nt, synthetic construct
  misc_feature 1..19: note = Description of Artificial Sequence: Synthetic oligonucleotide
  source 1..19: mol_type = other RNA
cataaagccatgtttcctc

SEQ ID NO: 3013 - RNA, 19 nt, synthetic construct
  misc_feature 1..19: note = Description of Artificial Sequence: Synthetic oligonucleotide
  source 1..19: mol_type = other RNA
ataaagccatgtttcctct

SEQ ID NO: 3014 - RNA, 19 nt, synthetic construct
  misc_feature 1..19: note = Description of Artificial Sequence: Synthetic oligonucleotide
  source 1..19: mol_type = other RNA
taaagccatgtttcctctt

SEQ ID NO: 3015 - RNA, 19 nt, synthetic construct
  misc_feature 1..19: note = Description of Artificial Sequence: Synthetic oligonucleotide
  source 1..19: mol_type = other RNA
aaagccatgtttcctcttt

SEQ ID NO: 3016 - RNA, 19 nt, synthetic construct
  misc_feature 1..19: note = Description of Artificial Sequence: Synthetic oligonucleotide
  source 1..19: mol_type = other RNA
aagccatgtttcctcttta

SEQ ID NO: 3017 - RNA, 19 nt, synthetic construct
  misc_feature 1..19: note = Description of Artificial Sequence: Synthetic oligonucleotide
  source 1..19: mol_type = other RNA
agccatgtttcctctttat

SEQ ID NO: 3018 - RNA, 19 nt, synthetic construct
  misc_feature 1..19: note = Description of Artificial Sequence: Synthetic oligonucleotide
  source 1..19: mol_type = other RNA
gccatgtttcctctttatg

SEQ ID NO: 3019 - RNA, 19 nt, synthetic construct
  misc_feature 1..19: note = Description of Artificial Sequence: Synthetic oligonucleotide
  source 1..19: mol_type = other RNA
ccatgtttcctctttatgc

SEQ ID NO: 3020 - RNA, 19 nt, synthetic construct
  misc_feature 1..19: note = Description of Artificial Sequence: Synthetic oligonucleotide
  source 1..19: mol_type = other RNA
catgtttcctctttatgcc

SEQ ID NO: 3021 - RNA, 19 nt, synthetic construct
  misc_feature 1..19: note = Description of Artificial Sequence: Synthetic oligonucleotide
  source 1..19: mol_type = other RNA
atgtttcctctttatgcct

SEQ ID NO: 3022 - RNA, 19 nt, synthetic construct
  misc_feature 1..19: note = Description of Artificial Sequence: Synthetic oligonucleotide
  source 1..19: mol_type = other RNA
tgtttcctctttatgcctg

SEQ ID NO: 3023 - RNA, 19 nt, synthetic construct
  misc_feature 1..19: note = Description of Artificial Sequence: Synthetic oligonucleotide
  source 1..19: mol_type = other RNA
gtttcctctttatgcctgt

SEQ ID NO: 3024 - RNA, 19 nt, synthetic construct
  misc_feature 1..19: note = Description of Artificial Sequence: Synthetic oligonucleotide
  source 1..19: mol_type = other RNA
tttcctctttatgcctgta

SEQ ID NO: 3025 - RNA, 19 nt, synthetic construct
  misc_feature 1..19: note = Description of Artificial Sequence: Synthetic oligonucleotide
  source 1..19: mol_type = other RNA
ggtcccctagcggaggctg

SEQ ID NO: 3026 - RNA, 19 nt, synthetic construct
  misc_feature 1..19: note = Description of Artificial Sequence: Synthetic oligonucleotide
  source 1..19: mol_type = other RNA
gggtcccctagcggaggct

SEQ ID NO: 3027 - RNA, 19 nt, synthetic construct
  misc_feature 1..19: note = Description of Artificial Sequence: Synthetic oligonucleotide
  source 1..19: mol_type = other RNA
ggggtcccctagcggaggc

SEQ ID NO: 3028 - RNA, 19 nt, synthetic construct
  misc_feature 1..19: note = Description of Artificial Sequence: Synthetic oligonucleotide
  source 1..19: mol_type = other RNA
gggggtcccctagcggagg

SEQ ID NO: 3029 - RNA, 19 nt, synthetic construct
  misc_feature 1..19: note = Description of Artificial Sequence: Synthetic oligonucleotide
  source 1..19: mol_type = other RNA
agggggtcccctagcggag

SEQ ID NO: 3030 - RNA, 19 nt, synthetic construct
  misc_feature 1..19: note = Description of Artificial Sequence: Synthetic oligonucleotide
  source 1..19: mol_type = other RNA
gagggggtcccctagcgga

SEQ ID NO: 3031 - RNA, 19 nt, synthetic construct
  misc_feature 1..19: note = Description of Artificial Sequence: Synthetic oligonucleotide
  source 1..19: mol_type = other RNA
ggagggggtcccctagcgg

SEQ ID NO: 3032 - RNA, 19 nt, synthetic construct
  misc_feature 1..19: note = Description of Artificial Sequence: Synthetic oligonucleotide
  source 1..19: mol_type = other RNA
tggagggggtcccctagcg

SEQ ID NO: 3033 - RNA, 19 nt, synthetic construct
  misc_feature 1..19: note = Description of Artificial Sequence: Synthetic oligonucleotide
  source 1..19: mol_type = other RNA
atggagggggtcccctagc

SEQ ID NO: 3034 - RNA, 19 nt, synthetic construct
  misc_feature 1..19: note = Description of Artificial Sequence: Synthetic oligonucleotide
  source 1..19: mol_type = other RNA
catggagggggtcccctag

SEQ ID NO: 3035 - RNA, 19 nt, synthetic construct
  misc_feature 1..19: note = Description of Artificial Sequence: Synthetic oligonucleotide
  source 1..19: mol_type = other RNA
ccatggagggggtccccta

SEQ ID NO: 3036 - RNA, 19 nt, synthetic construct
  misc_feature 1..19: note = Description of Artificial Sequence: Synthetic oligonucleotide
  source 1..19: mol_type = other RNA
gccatggagggggtcccct

SEQ ID NO: 3037 - RNA, 19 nt, synthetic construct
  misc_feature 1..19: note = Description of Artificial Sequence: Synthetic oligonucleotide
  source 1..19: mol_type = other RNA
agccatggagggggtcccc

SEQ ID NO: 3038 - RNA, 19 nt, synthetic construct
  misc_feature 1..19: note = Description of Artificial Sequence: Synthetic oligonucleotide
  source 1..19: mol_type = other RNA
aagccatggagggggtccc

SEQ ID NO: 3039 - RNA, 19 nt, synthetic construct
  misc_feature 1..19: note = Description of Artificial Sequence: Synthetic oligonucleotide
  source 1..19: mol_type = other RNA
gaagccatggagggggtcc

SEQ ID NO: 3040 - RNA, 19 nt, synthetic construct
  misc_feature 1..19: note = Description of Artificial Sequence: Synthetic oligonucleotide
  source 1..19: mol_type = other RNA
ggaagccatggagggggtc

SEQ ID NO: 3041 - RNA, 19 nt, synthetic construct
  misc_feature 1..19: note = Description of Artificial Sequence: Synthetic oligonucleotide
  source 1..19: mol_type = other RNA
gggaagccatggagggggt

SEQ ID NO: 3042 - RNA, 19 nt, synthetic construct
  misc_feature 1..19: note = Description of Artificial Sequence: Synthetic oligonucleotide
  source 1..19: mol_type = other RNA
tgggaagccatggaggggg

SEQ ID NO: 3043 - RNA, 19 nt, synthetic construct
  misc_feature 1..19: note = Description of Artificial Sequence: Synthetic oligonucleotide
  source 1..19: mol_type = other RNA
gtgggaagccatggagggg

SEQ ID NO: 3044 - RNA, 19 nt, synthetic construct
  misc_feature 1..19: note = Description of Artificial Sequence: Synthetic oligonucleotide
  source 1..19: mol_type = other RNA
ggtgggaagccatggaggg

SEQ ID NO: 3045 - RNA, 19 nt, synthetic construct
  misc_feature 1..19: note = Description of Artificial Sequence: Synthetic oligonucleotide
  source 1..19: mol_type = other RNA
cggtgggaagccatggagg

SEQ ID NO: 3046 - RNA, 19 nt, synthetic construct
  misc_feature 1..19: note = Description of Artificial Sequence: Synthetic oligonucleotide
  source 1..19: mol_type = other RNA
ccggtgggaagccatggag

SEQ ID NO: 3047 - RNA, 19 nt, synthetic construct
  misc_feature 1..19: note = Description of Artificial Sequence: Synthetic oligonucleotide
  source 1..19: mol_type = other RNA
cccggtgggaagccatgga

SEQ ID NO: 3048 - RNA, 19 nt, synthetic construct
  misc_feature 1..19: note = Description of Artificial Sequence: Synthetic oligonucleotide
  source 1..19: mol_type = other RNA
acccggtgggaagccatgg

SEQ ID NO: 3049 - RNA, 19 nt, synthetic construct
  misc_feature 1..19: note = Description of Artificial Sequence: Synthetic oligonucleotide
  source 1..19: mol_type = other RNA
aacccggtgggaagccatg

SEQ ID NO: 3050 - RNA, 19 nt, synthetic construct
  misc_feature 1..19: note = Description of Artificial Sequence: Synthetic oligonucleotide
  source 1..19: mol_type = other RNA
caacccggtgggaagccat

SEQ ID NO: 3051 - RNA, 19 nt, synthetic construct
  misc_feature 1..19: note = Description of Artificial Sequence: Synthetic oligonucleotide
  source 1..19: mol_type = other RNA
acaacccggtgggaagcca

SEQ ID NO: 3052 - RNA, 19 nt, synthetic construct
  misc_feature 1..19: note = Description of Artificial Sequence: Synthetic oligonucleotide
  source 1..19: mol_type = other RNA
aacaacccggtgggaagcc

SEQ ID NO: 3053 - RNA, 19 nt, synthetic construct
  misc_feature 1..19: note = Description of Artificial Sequence: Synthetic oligonucleotide
  source 1..19: mol_type = other RNA
gaacaacccggtgggaagc

SEQ ID NO: 3054 - RNA, 19 nt, synthetic construct
  misc_feature 1..19: note = Description of Artificial Sequence: Synthetic oligonucleotide
  source 1..19: mol_type = other RNA
ggaacaacccggtgggaag

SEQ ID NO: 3055 - RNA, 19 nt, synthetic construct
  misc_feature 1..19: note = Description of Artificial Sequence: Synthetic oligonucleotide
  source 1..19: mol_type = other RNA
tggaacaacccggtgggaa

SEQ ID NO: 3056 - RNA, 19 nt, synthetic construct
  misc_feature 1..19: note = Description of Artificial Sequence: Synthetic oligonucleotide
  source 1..19: mol_type = other RNA
ctggaacaacccggtggga

SEQ ID NO: 3057 - RNA, 19 nt, synthetic construct
  misc_feature 1..19: note = Description of Artificial Sequence: Synthetic oligonucleotide
  source 1..19: mol_type = other RNA
cctggaacaacccggtggg

SEQ ID NO: 3058 - RNA, 19 nt, synthetic construct
  misc_feature 1..19: note = Description of Artificial Sequence: Synthetic oligonucleotide
  source 1..19: mol_type = other RNA
gcctggaacaacccggtgg

SEQ ID NO: 3059 - RNA, 19 nt, synthetic construct
  misc_feature 1..19: note = Description of Artificial Sequence: Synthetic oligonucleotide
  source 1..19: mol_type = other RNA
ggcctggaacaacccggtg

SEQ ID NO: 3060 - RNA, 19 nt, synthetic construct
  misc_feature 1..19: note = Description of Artificial Sequence: Synthetic oligonucleotide
  source 1..19: mol_type = other RNA
aggcctggaacaacccggt

SEQ ID NO: 3061 - RNA, 19 nt, synthetic construct
  misc_feature 1..19: note = Description of Artificial Sequence: Synthetic oligonucleotide
  source 1..19: mol_type = other RNA
gaggcctggaacaacccgg

SEQ ID NO: 3062 - RNA, 19 nt, synthetic construct
  misc_feature 1..19: note = Description of Artificial Sequence: Synthetic oligonucleotide
  source 1..19: mol_type = other RNA
tgaggcctggaacaacccg

SEQ ID NO: 3063 - RNA, 19 nt, synthetic construct
  misc_feature 1..19: note = Description of Artificial Sequence: Synthetic oligonucleotide
  source 1..19: mol_type = other RNA
ctgaggcctggaacaaccc

SEQ ID NO: 3064 - RNA, 19 nt, synthetic construct
  misc_feature 1..19: note = Description of Artificial Sequence: Synthetic oligonucleotide
  source 1..19: mol_type = other RNA
gctgaggcctggaacaacc

SEQ ID NO: 3065 - RNA, 19 nt, synthetic construct
  misc_feature 1..19: note = Description of Artificial Sequence: Synthetic oligonucleotide
  source 1..19: mol_type = other RNA
agctgaggcctggaacaac

SEQ ID NO: 3066 - RNA, 19 nt, synthetic construct
  misc_feature 1..19: note = Description of Artificial Sequence: Synthetic oligonucleotide
  source 1..19: mol_type = other RNA
aagctgaggcctggaacaa

SEQ ID NO: 3067 - RNA, 19 nt, synthetic construct
  misc_feature 1..19: note = Description of Artificial Sequence: Synthetic oligonucleotide
  source 1..19: mol_type = other RNA
gaagctgaggcctggaaca

SEQ ID NO: 3068 - RNA, 19 nt, synthetic construct
  misc_feature 1..19: note = Description of Artificial Sequence: Synthetic oligonucleotide
  source 1..19: mol_type = other RNA
cgaagctgaggcctggaac

SEQ ID NO: 3069 - RNA, 19 nt, synthetic construct
  misc_feature 1..19: note = Description of Artificial Sequence: Synthetic oligonucleotide
  source 1..19: mol_type = other RNA
gcgaagctgaggcctggaa

SEQ ID NO: 3070 - RNA, 19 nt, synthetic construct
  misc_feature 1..19: note = Description of Artificial Sequence: Synthetic oligonucleotide
  source 1..19: mol_type = other RNA
ggcgaagctgaggcctgga

SEQ ID NO: 3071 - RNA, 19 nt, synthetic construct
  misc_feature 1..19: note = Description of Artificial Sequence: Synthetic oligonucleotide
  source 1..19: mol_type = other RNA
cggcgaagctgaggcctgg

SEQ ID NO: 3072 - RNA, 19 nt, synthetic construct
  misc_feature 1..19: note = Description of Artificial Sequence: Synthetic oligonucleotide
  source 1..19: mol_type = other RNA
tcggcgaagctgaggcctg

SEQ ID NO: 3073 - RNA, 19 nt, synthetic construct
  misc_feature 1..19: note = Description of Artificial Sequence: Synthetic oligonucleotide
  source 1..19: mol_type = other RNA
ttcggcgaagctgaggcct

SEQ ID NO: 3074 - RNA, 19 nt, synthetic construct
  misc_feature 1..19: note = Description of Artificial Sequence: Synthetic oligonucleotide
  source 1..19: mol_type = other RNA
tttcggcgaagctgaggcc

SEQ ID NO: 3075 - RNA, 19 nt, synthetic construct
  misc_feature 1..19: note = Description of Artificial Sequence: Synthetic oligonucleotide
  source 1..19: mol_type = other RNA
ctttcggcgaagctgaggc

SEQ ID NO: 3076 - RNA, 19 nt, synthetic construct
  misc_feature 1..19: note = Description of Artificial Sequence: Synthetic oligonucleotide
  source 1..19: mol_type = other RNA
cctttcggcgaagctgagg

SEQ ID NO: 3077 - RNA, 19 nt, synthetic construct
  misc_feature 1..19: note = Description of Artificial Sequence: Synthetic oligonucleotide
  source 1..19: mol_type = other RNA
gcctttcggcgaagctgag

SEQ ID NO: 3078 - RNA, 19 nt, synthetic construct
  misc_feature 1..19: note = Description of Artificial Sequence: Synthetic oligonucleotide
  source 1..19: mol_type = other RNA
ggcctttcggcgaagctga

SEQ ID NO: 3079 - RNA, 19 nt, synthetic construct
  misc_feature 1..19: note = Description of Artificial Sequence: Synthetic oligonucleotide
  source 1..19: mol_type = other RNA
aggcctttcggcgaagctg

SEQ ID NO: 3080 - RNA, 19 nt, synthetic construct
  misc_feature 1..19: note = Description of Artificial Sequence: Synthetic oligonucleotide
  source 1..19: mol_type = other RNA
gaggcctttcggcgaagct

SEQ ID NO: 3081 - RNA, 19 nt, synthetic construct
  misc_feature 1..19: note = Description of Artificial Sequence: Synthetic oligonucleotide
  source 1..19: mol_type = other RNA
tgaggcctttcggcgaagc

SEQ ID NO: 3082 - RNA, 19 nt, synthetic construct
  misc_feature 1..19: note = Description of Artificial Sequence: Synthetic oligonucleotide
  source 1..19: mol_type = other RNA
gtgaggcctttcggcgaag

SEQ ID NO: 3083 - RNA, 19 nt, synthetic construct
  misc_feature 1..19: note = Description of Artificial Sequence: Synthetic oligonucleotide
  source 1..19: mol_type = other RNA
ggtgaggcctttcggcgaa

SEQ ID NO: 3084 - RNA, 19 nt, synthetic construct
  misc_feature 1..19: note = Description of Artificial Sequence: Synthetic oligonucleotide
  source 1..19: mol_type = other RNA
tggtgaggcctttcggcga

SEQ ID NO: 3085 - RNA, 19 nt, synthetic construct
  misc_feature 1..19: note = Description of Artificial Sequence: Synthetic oligonucleotide
  source 1..19: mol_type = other RNA
gtggtgaggcctttcggcg

SEQ ID NO: 3086 - RNA, 19 nt, synthetic construct
  misc_feature 1..19: note = Description of Artificial Sequence: Synthetic oligonucleotide
  source 1..19: mol_type = other RNA
ggtggtgaggcctttcggc

SEQ ID NO: 3087 - RNA, 19 nt, synthetic construct
  misc_feature 1..19: note = Description of Artificial Sequence: Synthetic oligonucleotide
  source 1..19: mol_type = other RNA
aggtggtgaggcctttcgg

SEQ ID NO: 3088 - RNA, 19 nt, synthetic construct
  misc_feature 1..19: note = Description of Artificial Sequence: Synthetic oligonucleotide
  source 1..19: mol_type = other RNA
gaggtggtgaggcctttcg

SEQ ID NO: 3089 - RNA, 19 nt, synthetic construct
  misc_feature 1..19: note = Description of Artificial Sequence: Synthetic oligonucleotide
  source 1..19: mol_type = other RNA
ggaggtggtgaggcctttc

SEQ ID NO: 3090 - RNA, 19 nt, synthetic construct
  misc_feature 1..19: note = Description of Artificial Sequence: Synthetic oligonucleotide
  source 1..19: mol_type = other RNA
cggaggtggtgaggccttt

SEQ ID NO: 3091 - RNA, 19 nt, synthetic construct
  misc_feature 1..19: note = Description of Artificial Sequence: Synthetic oligonucleotide
  source 1..19: mol_type = other RNA
tcggaggtggtgaggcctt

SEQ ID NO: 3092 - RNA, 19 nt, synthetic construct
  misc_feature 1..19: note = Description of Artificial Sequence: Synthetic oligonucleotide
  source 1..19: mol_type = other RNA
gtcggaggtggtgaggcct

SEQ ID NO: 3093 - RNA, 19 nt, synthetic construct
  misc_feature 1..19: note = Description of Artificial Sequence: Synthetic oligonucleotide
  source 1..19: mol_type = other RNA
ggtcggaggtggtgaggcc

SEQ ID NO: 3094 - RNA, 19 nt, synthetic construct
  misc_feature 1..19: note = Description of Artificial Sequence: Synthetic oligonucleotide
  source 1..19: mol_type = other RNA
aggtcggaggtggtgaggc

SEQ ID NO: 3095 - RNA, 19 nt, synthetic construct
  misc_feature 1..19: note = Description of Artificial Sequence: Synthetic oligonucleotide
  source 1..19: mol_type = other RNA
gaggtcggaggtggtgagg

SEQ ID NO: 3096 - RNA, 19 nt, synthetic construct
  misc_feature 1..19: note = Description of Artificial Sequence: Synthetic oligonucleotide
  source 1..19: mol_type = other RNA
ggaggtcggaggtggtgag

SEQ ID NO: 3097 - RNA, 19 nt, synthetic construct
  misc_feature 1..19: note = Description of Artificial Sequence: Synthetic oligonucleotide
  source 1..19: mol_type = other RNA
cggaggtcggaggtggtga

SEQ ID NO: 3098 - RNA, 19 nt, synthetic construct
  misc_feature 1..19: note = Description of Artificial Sequence: Synthetic oligonucleotide
  source 1..19: mol_type = other RNA
gcggaggtcggaggtggtg

SEQ ID NO: 3099 - RNA, 19 nt, synthetic construct
  misc_feature 1..19: note = Description of Artificial Sequence: Synthetic oligonucleotide
  source 1..19: mol_type = other RNA
ggcggaggtcggaggtggt

SEQ ID NO: 3100 - RNA, 19 nt, synthetic construct
  misc_feature 1..19: note = Description of Artificial Sequence: Synthetic oligonucleotide
  source 1..19: mol_type = other RNA
aggcggaggtcggaggtgg

SEQ ID NO: 3101 - RNA, 19 nt, synthetic construct
  misc_feature 1..19: note = Description of Artificial Sequence: Synthetic oligonucleotide
  source 1..19: mol_type = other RNA
caggcggaggtcggaggtg

SEQ ID NO: 3102 - RNA, 19 nt, synthetic construct
  misc_feature 1..19: note = Description of Artificial Sequence: Synthetic oligonucleotide
  source 1..19: mol_type = other RNA
gcaggcggaggtcggaggt

SEQ ID NO: 3103 - RNA, 19 nt, synthetic construct
  misc_feature 1..19: note = Description of Artificial Sequence: Synthetic oligonucleotide
  source 1..19: mol_type = other RNA
agcaggcggaggtcggagg

SEQ ID NO: 3104 - RNA, 19 nt, synthetic construct
  misc_feature 1..19: note = Description of Artificial Sequence: Synthetic oligonucleotide
  source 1..19: mol_type = other RNA
gagcaggcggaggtcggag

SEQ ID NO: 3105 - RNA, 19 nt, synthetic construct
  misc_feature 1..19: note = Description of Artificial Sequence: Synthetic oligonucleotide
  source 1..19: mol_type = other RNA
agagcaggcggaggtcgga

SEQ ID NO: 3106 - RNA, 19 nt, synthetic construct
  misc_feature 1..19: note = Description of Artificial Sequence: Synthetic oligonucleotide
  source 1..19: mol_type = other RNA
cagagcaggcggaggtcgg

SEQ ID NO: 3107 - RNA, 19 nt, synthetic construct
  misc_feature 1..19: note = Description of Artificial Sequence: Synthetic oligonucleotide
  source 1..19: mol_type = other RNA
ccagagcaggcggaggtcg

SEQ ID NO: 3108 - RNA, 19 nt, synthetic construct
  misc_feature 1..19: note = Description of Artificial Sequence: Synthetic oligonucleotide
  source 1..19: mol_type = other RNA
cccagagcaggcggaggtc

SEQ ID NO: 3109 - RNA, 19 nt, synthetic construct
  misc_feature 1..19: note = Description of Artificial Sequence: Synthetic oligonucleotide
  source 1..19: mol_type = other RNA
ccccagagcaggcggaggt

SEQ ID NO: 3110 - RNA, 19 nt, synthetic construct
  misc_feature 1..19: note = Description of Artificial Sequence: Synthetic oligonucleotide
  source 1..19: mol_type = other RNA
tccccagagcaggcggagg

SEQ ID NO: 3111 - RNA, 19 nt, synthetic construct
  misc_feature 1..19: note = Description of Artificial Sequence: Synthetic oligonucleotide
  source 1..19: mol_type = other RNA
atccccagagcaggcggag

SEQ ID NO: 3112 - RNA, 19 nt, synthetic construct
  misc_feature 1..19: note = Description of Artificial Sequence: Synthetic oligonucleotide
  source 1..19: mol_type = other RNA
catccccagagcaggcgga

SEQ ID NO: 3113 - RNA, 19 nt, synthetic construct
  misc_feature 1..19: note = Description of Artificial Sequence: Synthetic oligonucleotide
  source 1..19: mol_type = other RNA
gcatccccagagcaggcgg

SEQ ID NO: 3114 - RNA, 19 nt, synthetic construct
  misc_feature 1..19: note = Description of Artificial Sequence: Synthetic oligonucleotide
  source 1..19: mol_type = other RNA
agcatccccagagcaggcg

SEQ ID NO: 3115 - RNA, 19 nt, synthetic construct
  misc_feature 1..19: note = Description of Artificial Sequence: Synthetic oligonucleotide
  source 1..19: mol_type = other RNA
gagcatccccagagcaggc

SEQ ID NO: 3116 - RNA, 19 nt, synthetic construct
  misc_feature 1..19: note = Description of Artificial Sequence: Synthetic oligonucleotide
  source 1..19: mol_type = other RNA
ggagcatccccagagcagg

SEQ ID NO: 3117 - RNA, 19 nt, synthetic construct
  misc_feature 1..19: note = Description of Artificial Sequence: Synthetic oligonucleotide
  source 1..19: mol_type = other RNA
gggagcatccccagagcag

SEQ ID NO: 3118 - RNA, 19 nt, synthetic construct
  misc_feature 1..19: note = Description of Artificial Sequence: Synthetic oligonucleotide
  source 1..19: mol_type = other RNA
tgggagcatccccagagca

SEQ ID NO: 3119 - RNA, 19 nt, synthetic construct
  misc_feature 1..19: note = Description of Artificial Sequence: Synthetic oligonucleotide
  source 1..19: mol_type = other RNA
ctgggagcatccccagagc

SEQ ID NO: 3120 - RNA, 19 nt, synthetic construct
  misc_feature 1..19: note = Description of Artificial Sequence: Synthetic oligonucleotide
  source 1..19: mol_type = other RNA
gctgggagcatccccagag

SEQ ID NO: 3121 - RNA, 19 nt, synthetic construct
  misc_feature 1..19: note = Description of Artificial Sequence: Synthetic oligonucleotide
  source 1..19: mol_type = other RNA
ggctgggagcatccccaga

SEQ ID NO: 3122 - RNA, 19 nt, synthetic construct
  misc_feature 1..19: note = Description of Artificial Sequence: Synthetic oligonucleotide
  source 1..19: mol_type = other RNA
gggctgggagcatccccag

SEQ ID NO: 3123 - RNA, 19 nt, synthetic construct
  misc_feature 1..19: note = Description of Artificial Sequence: Synthetic oligonucleotide
  source 1..19: mol_type = other RNA
agggctgggagcatcccca

SEQ ID NO: 3124 - RNA, 19 nt, synthetic construct
  misc_feature 1..19: note = Description of Artificial Sequence: Synthetic oligonucleotide
  source 1..19: mol_type = other RNA
cagggctgggagcatcccc

SEQ ID NO: 3125 - RNA, 19 nt, synthetic construct
  misc_feature 1..19: note = Description of Artificial Sequence: Synthetic oligonucleotide
  source 1..19: mol_type = other RNA
gcagggctgggagcatccc

SEQ ID NO: 3126 - RNA, 19 nt, synthetic construct
  misc_feature 1..19: note = Description of Artificial Sequence: Synthetic oligonucleotide
  source 1..19: mol_type = other RNA
agcagggctgggagcatcc

SEQ ID NO: 3127 - RNA, 19 nt, synthetic construct
  misc_feature 1..19: note = Description of Artificial Sequence: Synthetic oligonucleotide
  source 1..19: mol_type = other RNA
cagcagggctgggagcatc

SEQ ID NO: 3128 - RNA, 19 nt, synthetic construct
  misc_feature 1..19: note = Description of Artificial Sequence: Synthetic oligonucleotide
  source 1..19: mol_type = other RNA
gcagcagggctgggagcat

SEQ ID NO: 3129 - RNA, 19 nt, synthetic construct
  misc_feature 1..19: note = Description of Artificial Sequence: Synthetic oligonucleotide
  source 1..19: mol_type = other RNA
cgcagcagggctgggagca

SEQ ID NO: 3130 - RNA, 19 nt, synthetic construct
  misc_feature 1..19: note = Description of Artificial Sequence: Synthetic oligonucleotide
  source 1..19: mol_type = other RNA
ccgcagcagggctgggagc

SEQ ID NO: 3131 - RNA, 19 nt, synthetic construct
  misc_feature 1..19: note = Description of Artificial Sequence: Synthetic oligonucleotide
  source 1..19: mol_type = other RNA
gccgcagcagggctgggag

SEQ ID NO: 3132 - RNA, 19 nt, synthetic construct
  misc_feature 1..19: note = Description of Artificial Sequence: Synthetic oligonucleotide
  source 1..19: mol_type = other RNA
tgccgcagcagggctggga

SEQ ID NO: 3133 - RNA, 19 nt, synthetic construct
  misc_feature 1..19: note = Description of Artificial Sequence: Synthetic oligonucleotide
  source 1..19: mol_type = other RNA
ctgccgcagcagggctggg

SEQ ID NO: 3134 - RNA, 19 nt, synthetic construct
  misc_feature 1..19: note = Description of Artificial Sequence: Synthetic oligonucleotide
  source 1..19: mol_type = other RNA
tctgccgcagcagggctgg

SEQ ID NO: 3135 - RNA, 19 nt, synthetic construct
  misc_feature 1..19: note = Description of Artificial Sequence: Synthetic oligonucleotide
  source 1..19: mol_type = other RNA
ttctgccgcagcagggctg

SEQ ID NO: 3136 - RNA, 19 nt, synthetic construct
  misc_feature 1..19: note = Description of Artificial Sequence: Synthetic oligonucleotide
  source 1..19: mol_type = other RNA
gttctgccgcagcagggct

SEQ ID NO: 3137 - RNA, 19 nt, synthetic construct
  misc_feature 1..19: note = Description of Artificial Sequence: Synthetic oligonucleotide
  source 1..19: mol_type = other RNA
cgttctgccgcagcagggc

SEQ ID NO: 3138 - RNA, 19 nt, synthetic construct
  misc_feature 1..19: note = Description of Artificial Sequence: Synthetic oligonucleotide
  source 1..19: mol_type = other RNA
gcgttctgccgcagcaggg

SEQ ID NO: 3139 - RNA, 19 nt, synthetic construct
  misc_feature 1..19: note = Description of Artificial Sequence: Synthetic oligonucleotide
  source 1..19: mol_type = other RNA
cgcgttctgccgcagcagg

SEQ ID NO: 3140 - RNA, 19 nt, synthetic construct
  misc_feature 1..19: note = Description of Artificial Sequence: Synthetic oligonucleotide
  source 1..19: mol_type = other RNA
tcgcgttctgccgcagcag

SEQ ID NO: 3141 - RNA, 19 nt, synthetic construct
  misc_feature 1..19: note = Description of Artificial Sequence: Synthetic oligonucleotide
  source 1..19: mol_type = other RNA
gtcgcgttctgccgcagca

SEQ ID NO: 3142 - RNA, 19 nt, synthetic construct
  misc_feature 1..19: note = Description of Artificial Sequence: Synthetic oligonucleotide
  source 1..19: mol_type = other RNA
tgtcgcgttctgccgcagc

SEQ ID NO: 3143 - RNA, 19 nt, synthetic construct
  misc_feature 1..19: note = Description of Artificial Sequence: Synthetic oligonucleotide
  source 1..19: mol_type = other RNA
atgtcgcgttctgccgcag

SEQ ID NO: 3144 - RNA, 19 nt, synthetic construct
  misc_feature 1..19: note = Description of Artificial Sequence: Synthetic oligonucleotide
  source 1..19: mol_type = other RNA
catgtcgcgttctgccgca

SEQ ID NO: 3145 - RNA, 19 nt, synthetic construct
  misc_feature 1..19: note = Description of Artificial Sequence: Synthetic oligonucleotide
  source 1..19: mol_type = other RNA
gcatgtcgcgttctgccgc

SEQ ID NO: 3146 - RNA, 19 nt, synthetic construct
  misc_feature 1..19: note = Description of Artificial Sequence: Synthetic oligonucleotide
  source 1..19: mol_type = other RNA
agcatgtcgcgttctgccg

SEQ ID NO: 3147 - RNA, 19 nt, synthetic construct
  misc_feature 1..19: note = Description of Artificial Sequence: Synthetic oligonucleotide
  source 1..19: mol_type = other RNA
tagcatgtcgcgttctgcc

SEQ ID NO: 3148 - RNA, 19 nt, synthetic construct
  misc_feature 1..19: note = Description of Artificial Sequence: Synthetic oligonucleotide
  source 1..19: mol_type = other RNA
ttagcatgtcgcgttctgc

SEQ ID NO: 3149 - RNA, 19 nt, synthetic construct
  misc_feature 1..19: note = Description of Artificial Sequence: Synthetic oligonucleotide
  source 1..19: mol_type = other RNA
gttagcatgtcgcgttctg

SEQ ID NO: 3150 - RNA, 19 nt, synthetic construct
  misc_feature 1..19: note = Description of Artificial Sequence: Synthetic oligonucleotide
  source 1..19: mol_type = other RNA
ggttagcatgtcgcgttct

SEQ ID NO: 3151 - RNA, 19 nt, synthetic construct
  misc_feature 1..19: note = Description of Artificial Sequence: Synthetic oligonucleotide
  source 1..19: mol_type = other RNA
cggttagcatgtcgcgttc

SEQ ID NO: 3152 - RNA, 19 nt, synthetic construct
  misc_feature 1..19: note = Description of Artificial Sequence: Synthetic oligonucleotide
  source 1..19: mol_type = other RNA
ccggttagcatgtcgcgtt

SEQ ID NO: 3153 - RNA, 19 nt, synthetic construct
  misc_feature 1..19: note = Description of Artificial Sequence: Synthetic oligonucleotide
  source 1..19: mol_type = other RNA
tccggttagcatgtcgcgt

SEQ ID NO: 3154 - RNA, 19 nt, synthetic construct
  misc_feature 1..19: note = Description of Artificial Sequence: Synthetic oligonucleotide
  source 1..19: mol_type = other RNA
ttccggttagcatgtcgcg

SEQ ID NO: 3155 - RNA, 19 nt, synthetic construct
  misc_feature 1..19: note = Description of Artificial Sequence: Synthetic oligonucleotide
  source 1..19: mol_type = other RNA
attccggttagcatgtcgc

SEQ ID NO: 3156 - RNA, 19 nt, synthetic construct
  misc_feature 1..19: note = Description of Artificial Sequence: Synthetic oligonucleotide
  source 1..19: mol_type = other RNA
gattccggttagcatgtcg

SEQ ID NO: 3157 - RNA, 19 nt, synthetic construct
  misc_feature 1..19: note = Description of Artificial Sequence: Synthetic oligonucleotide
  source 1..19: mol_type = other RNA
ggattccggttagcatgtc

SEQ ID NO: 3158 - RNA, 19 nt, synthetic construct
  misc_feature 1..19: note = Description of Artificial Sequence: Synthetic oligonucleotide
  source 1..19: mol_type = other RNA
gggattccggttagcatgt

SEQ ID NO: 3159 - RNA, 19 nt, synthetic construct
  misc_feature 1..19: note = Description of Artificial Sequence: Synthetic oligonucleotide
  source 1..19: mol_type = other RNA
agggattccggttagcatg

SEQ ID NO: 3160 - RNA, 19 nt, synthetic construct
  misc_feature 1..19: note = Description of Artificial Sequence: Synthetic oligonucleotide
  source 1..19: mol_type = other RNA
tagggattccggttagcat

SEQ ID NO: 3161 - RNA, 19 nt, synthetic construct
  misc_feature 1..19: note = Description of Artificial Sequence: Synthetic oligonucleotide
  source 1..19: mol_type = other RNA
ctagggattccggttagca

SEQ ID NO: 3162 - RNA, 19 nt, synthetic construct
  misc_feature 1..19: note = Description of Artificial Sequence: Synthetic oligonucleotide
  source 1..19: mol_type = other RNA
cctagggattccggttagc

SEQ ID NO: 3163 - RNA, 19 nt, synthetic construct
  misc_feature 1..19: note = Description of Artificial Sequence: Synthetic oligonucleotide
  source 1..19: mol_type = other RNA
gcctagggattccggttag

SEQ ID NO: 3164 - RNA, 19 nt, synthetic construct
  misc_feature 1..19: note = Description of Artificial Sequence: Synthetic oligonucleotide
  source 1..19: mol_type = other RNA
ggcctagggattccggtta

SEQ ID NO: 3165 - RNA, 19 nt, synthetic construct
  misc_feature 1..19: note = Description of Artificial Sequence: Synthetic oligonucleotide
  source 1..19: mol_type = other RNA
cggcctagggattccggtt

SEQ ID NO: 3166 - RNA, 19 nt, synthetic construct
  misc_feature 1..19: note = Description of Artificial Sequence: Synthetic oligonucleotide
  source 1..19: mol_type = other RNA
gcggcctagggattccggt

SEQ ID NO: 3167 - RNA, 19 nt, synthetic construct
  misc_feature 1..19: note = Description of Artificial Sequence: Synthetic oligonucleotide
  source 1..19: mol_type = other RNA
ggcggcctagggattccgg

SEQ ID NO: 3168 - RNA, 19 nt, synthetic construct
  misc_feature 1..19: note = Description of Artificial Sequence: Synthetic oligonucleotide
  source 1..19: mol_type = other RNA
aggcggcctagggattccg

SEQ ID NO: 3169 - RNA, 19 nt, synthetic construct
  misc_feature 1..19: note = Description of Artificial Sequence: Synthetic oligonucleotide
  source 1..19: mol_type = other RNA
caggcggcctagggattcc

SEQ ID NO: 3170 - RNA, 19 nt, synthetic construct
  misc_feature 1..19: note = Description of Artificial Sequence: Synthetic oligonucleotide
  source 1..19: mol_type = other RNA
acaggcggcctagggattc

SEQ ID NO: 3171 - RNA, 19 nt, synthetic construct
  misc_feature 1..19: note = Description of Artificial Sequence: Synthetic oligonucleotide
  source 1..19: mol_type = other RNA
gacaggcggcctagggatt

SEQ ID NO: 3172 - RNA, 19 nt, synthetic construct
  misc_feature 1..19: note = Description of Artificial Sequence: Synthetic oligonucleotide
  source 1..19: mol_type = other RNA
agacaggcggcctagggat

SEQ ID NO: 3173 - RNA, 19 nt, synthetic construct
  misc_feature 1..19: note = Description of Artificial Sequence: Synthetic oligonucleotide
  source 1..19: mol_type = other RNA
gagacaggcggcctaggga

SEQ ID NO: 3174 - RNA, 19 nt, synthetic construct
  misc_feature 1..19: note = Description of Artificial Sequence: Synthetic oligonucleotide
  source 1..19: mol_type = other RNA
ggagacaggcggcctaggg

SEQ ID NO: 3175 - RNA, 19 nt, synthetic construct
  misc_feature 1..19: note = Description of Artificial Sequence: Synthetic oligonucleotide
  source 1..19: mol_type = other RNA
aggagacaggcggcctagg

SEQ ID NO: 3176 - RNA, 19 nt, synthetic construct
  misc_feature 1..19: note = Description of Artificial Sequence: Synthetic oligonucleotide
  source 1..19: mol_type = other RNA
taggagacaggcggcctag

SEQ ID NO: 3177 - RNA, 19 nt, synthetic construct
  misc_feature 1..19: note = Description of Artificial Sequence: Synthetic oligonucleotide
  source 1..19: mol_type = other RNA
gtaggagacaggcggccta

SEQ ID NO: 3178 - RNA, 19 nt, synthetic construct
  misc_feature 1..19: note = Description of Artificial Sequence: Synthetic oligonucleotide
  source 1..19: mol_type = other RNA
ggtaggagacaggcggcct

SEQ ID NO: 3179 - RNA, 19 nt, synthetic construct
  misc_feature 1..19: note = Description of Artificial Sequence: Synthetic oligonucleotide
  source 1..19: mol_type = other RNA
gggtaggagacaggcggcc

SEQ ID NO: 3180 - RNA, 19 nt, synthetic construct
  misc_feature 1..19: note = Description of Artificial Sequence: Synthetic oligonucleotide
  source 1..19: mol_type = other RNA
tgggtaggagacaggcggc

SEQ ID NO: 3181 - RNA, 19 nt, synthetic construct
  misc_feature 1..19: note = Description of Artificial Sequence: Synthetic oligonucleotide
  source 1..19: mol_type = other RNA
atgggtaggagacaggcgg

SEQ ID NO: 3182 - RNA, 19 nt, synthetic construct
  misc_feature 1..19: note = Description of Artificial Sequence: Synthetic oligonucleotide
  source 1..19: mol_type = other RNA
tatgggtaggagacaggcg

SEQ ID NO: 3183 - RNA, 19 nt, synthetic construct
  misc_feature 1..19: note = Description of Artificial Sequence: Synthetic oligonucleotide
  source 1..19: mol_type = other RNA
gtatgggtaggagacaggc

SEQ ID NO: 3184 - RNA, 19 nt, synthetic construct
  misc_feature 1..19: note = Description of Artificial Sequence: Synthetic oligonucleotide
  source 1..19: mol_type = other RNA
agtatgggtaggagacagg

SEQ ID NO: 3185 - RNA, 19 nt, synthetic construct
  misc_feature 1..19: note = Description of Artificial Sequence: Synthetic oligonucleotide
  source 1..19: mol_type = other RNA
aagtatgggtaggagacag

SEQ ID NO: 3186 - RNA, 19 nt, synthetic construct
  misc_feature 1..19: note = Description of Artificial Sequence: Synthetic oligonucleotide
  source 1..19: mol_type = other RNA
taagtatgggtaggagaca

SEQ ID NO: 3187 - RNA, 19 nt, synthetic construct
  misc_feature 1..19: note = Description of Artificial Sequence: Synthetic oligonucleotide
  source 1..19: mol_type = other RNA
ctaagtatgggtaggagac

SEQ ID NO: 3188 - RNA, 19 nt, synthetic construct
  misc_feature 1..19: note = Description of Artificial Sequence: Synthetic oligonucleotide
  source 1..19: mol_type = other RNA
tctaagtatgggtaggaga

SEQ ID NO: 3189 - RNA, 19 nt, synthetic construct
  misc_feature 1..19: note = Description of Artificial Sequence: Synthetic oligonucleotide
  source 1..19: mol_type = other RNA
ctctaagtatgggtaggag

SEQ ID NO: 3190 - RNA, 19 nt, synthetic construct
  misc_feature 1..19: note = Description of Artificial Sequence: Synthetic oligonucleotide
  source 1..19: mol_type = other RNA
cctctaagtatgggtagga

SEQ ID NO: 3191 - RNA, 19 nt, synthetic construct
  misc_feature 1..19: note = Description of Artificial Sequence: Synthetic oligonucleotide
  source 1..19: mol_type = other RNA
gcctctaagtatgggtagg

SEQ ID NO: 3192 - RNA, 19 nt, synthetic construct
  misc_feature 1..19: note = Description of Artificial Sequence: Synthetic oligonucleotide
  source 1..19: mol_type = other RNA
ggcctctaagtatgggtag

SEQ ID NO: 3193 - RNA, 19 nt, synthetic construct
  misc_feature 1..19: note = Description of Artificial Sequence: Synthetic oligonucleotide
  source 1..19: mol_type = other RNA
gggcctctaagtatgggta

SEQ ID NO: 3194 - RNA, 19 nt, synthetic construct
  misc_feature 1..19: note = Description of Artificial Sequence: Synthetic oligonucleotide
  source 1..19: mol_type = other RNA
ggggcctctaagtatgggt

SEQ ID NO: 3195 - RNA, 19 nt, synthetic construct
  misc_feature 1..19: note = Description of Artificial Sequence: Synthetic oligonucleotide
  source 1..19: mol_type = other RNA
cggggcctctaagtatggg

SEQ ID NO: 3196 - RNA, 19 nt, synthetic construct
  misc_feature 1..19: note = Description of Artificial Sequence: Synthetic oligonucleotide
  source 1..19: mol_type = other RNA
gcggggcctctaagtatgg

SEQ ID NO: 3197 - RNA, 19 nt, synthetic construct
  misc_feature 1..19: note = Description of Artificial Sequence: Synthetic oligonucleotide
  source 1..19: mol_type = other RNA
agcggggcctctaagtatg

SEQ ID NO: 3198 - RNA, 19 nt, synthetic construct
  misc_feature 1..19: note = Description of Artificial Sequence: Synthetic oligonucleotide
  source 1..19: mol_type = other RNA
gagcggggcctctaagtat

SEQ ID NO: 3199 - RNA, 19 nt, synthetic construct
  misc_feature 1..19: note = Description of Artificial Sequence: Synthetic oligonucleotide
  source 1..19: mol_type = other RNA
tgagcggggcctctaagta

SEQ ID NO: 3200 - RNA, 19 nt, synthetic construct
  misc_feature 1..19: note = Description of Artificial Sequence: Synthetic oligonucleotide
  source 1..19: mol_type = other RNA
ctgagcggggcctctaagt

SEQ ID NO: 3201 - RNA, 19 nt, synthetic construct
  misc_feature 1..19: note = Description of Artificial Sequence: Synthetic oligonucleotide
  source 1..19: mol_type = other RNA
tctgagcggggcctctaag

SEQ ID NO: 3202 - RNA, 19 nt, synthetic construct
  misc_feature 1..19: note = Description of Artificial Sequence: Synthetic oligonucleotide
  source 1..19: mol_type = other RNA
gtctgagcggggcctctaa

SEQ ID NO: 3203 - RNA, 19 nt, synthetic construct
  misc_feature 1..19: note = Description of Artificial Sequence: Synthetic oligonucleotide
  source 1..19: mol_type = other RNA
cgtctgagcggggcctcta

SEQ ID NO: 3204 - RNA, 19 nt, synthetic construct
  misc_feature 1..19: note = Description of Artificial Sequence: Synthetic oligonucleotide
  source 1..19: mol_type = other RNA
ccgtctgagcggggcctct

SEQ ID NO: 3205 - RNA, 19 nt, synthetic construct
  misc_feature 1..19: note = Description of Artificial Sequence: Synthetic oligonucleotide
  source 1..19: mol_type = other RNA
accgtctgagcggggcctc

SEQ ID NO: 3206 - RNA, 19 nt, synthetic construct
  misc_feature 1..19: note = Description of Artificial Sequence: Synthetic oligonucleotide
  source 1..19: mol_type = other RNA
gaccgtctgagcggggcct

SEQ ID NO: 3207 - RNA, 19 nt, synthetic construct
  misc_feature 1..19: note = Description of Artificial Sequence: Synthetic oligonucleotide
  source 1..19: mol_type = other RNA
ggaccgtctgagcggggcc

SEQ ID NO: 3208 - RNA, 19 nt, synthetic construct
  misc_feature 1..19: note = Description of Artificial Sequence: Synthetic oligonucleotide
  source 1..19: mol_type = other RNA
aggaccgtctgagcggggc

SEQ ID NO: 3209 - RNA, 19 nt, synthetic construct
  misc_feature 1..19: note = Description of Artificial Sequence: Synthetic oligonucleotide
  source 1..19: mol_type = other RNA
aaggaccgtctgagcgggg

SEQ ID NO: 3210 - RNA, 19 nt, synthetic construct
  misc_feature 1..19: note = Description of Artificial Sequence: Synthetic oligonucleotide
  source 1..19: mol_type = other RNA
taaggaccgtctgagcggg

SEQ ID NO: 3211 - RNA, 19 nt, synthetic construct
  misc_feature 1..19: note = Description of Artificial Sequence: Synthetic oligonucleotide
  source 1..19: mol_type = other RNA
ttaaggaccgtctgagcgg

SEQ ID NO: 3212 - RNA, 19 nt, synthetic construct
  misc_feature 1..19: note = Description of Artificial Sequence: Synthetic oligonucleotide
  source 1..19: mol_type = other RNA
tttaaggaccgtctgagcg

SEQ ID NO: 3213 - RNA, 19 nt, synthetic construct
  misc_feature 1..19: note = Description of Artificial Sequence: Synthetic oligonucleotide
  source 1..19: mol_type = other RNA
ttttaaggaccgtctgagc

SEQ ID NO: 3214 - RNA, 19 nt, synthetic construct
  misc_feature 1..19: note = Description of Artificial Sequence: Synthetic oligonucleotide
  source 1..19: mol_type = other RNA
gttttaaggaccgtctgag

SEQ ID NO: 3215 - RNA, 19 nt, synthetic construct
  misc_feature 1..19: note = Description of Artificial Sequence: Synthetic oligonucleotide
  source 1..19: mol_type = other RNA
cgttttaaggaccgtctga

SEQ ID NO: 3216 - RNA, 19 nt, synthetic construct
  misc_feature 1..19: note = Description of Artificial Sequence: Synthetic oligonucleotide
  source 1..19: mol_type = other RNA
acgttttaaggaccgtctg

SEQ ID NO: 3217 - RNA, 19 nt, synthetic construct
  misc_feature 1..19: note = Description of Artificial Sequence: Synthetic oligonucleotide
  source 1..19: mol_type = other RNA
gacgttttaaggaccgtct

SEQ ID NO: 3218 - RNA, 19 nt, synthetic construct
  misc_feature 1..19: note = Description of Artificial Sequence: Synthetic oligonucleotide
  source 1..19: mol_type = other RNA
agacgttttaaggaccgtc

SEQ ID NO: 3219 - RNA, 19 nt, synthetic construct
  misc_feature 1..19: note = Description of Artificial Sequence: Synthetic oligonucleotide
  source 1..19: mol_type = other RNA
cagacgttttaaggaccgt

SEQ ID NO: 3220 - RNA, 19 nt, synthetic construct
  misc_feature 1..19: note = Description of Artificial Sequence: Synthetic oligonucleotide
  source 1..19: mol_type = other RNA
tcagacgttttaaggaccg

SEQ ID NO: 3221 - RNA, 19 nt, synthetic construct
  misc_feature 1..19: note = Description of Artificial Sequence: Synthetic oligonucleotide
  source 1..19: mol_type = other RNA
ttcagacgttttaaggacc

SEQ ID NO: 3222 - RNA, 19 nt, synthetic construct
  misc_feature 1..19: note = Description of Artificial Sequence: Synthetic oligonucleotide
  source 1..19: mol_type = other RNA
tttcagacgttttaaggac

SEQ ID NO: 3223 - RNA, 19 nt, synthetic construct
  misc_feature 1..19: note = Description of Artificial Sequence: Synthetic oligonucleotide
  source 1..19: mol_type = other RNA
ctttcagacgttttaagga

SEQ ID NO: 3224 - RNA, 19 nt, synthetic construct
  misc_feature 1..19: note = Description of Artificial Sequence: Synthetic oligonucleotide
  source 1..19: mol_type = other RNA
cctttcagacgttttaagg

SEQ ID NO: 3225 - RNA, 19 nt, synthetic construct
  misc_feature 1..19: note = Description of Artificial Sequence: Synthetic oligonucleotide
  source 1..19: mol_type = other RNA
gcctttcagacgttttaag

SEQ ID NO: 3226 - RNA, 19 nt, synthetic construct
  misc_feature 1..19: note = Description of Artificial Sequence: Synthetic oligonucleotide
  source 1..19: mol_type = other RNA
ggcctttcagacgttttaa

SEQ ID NO: 3227 - RNA, 19 nt, synthetic construct
  misc_feature 1..19: note = Description of Artificial Sequence: Synthetic oligonucleotide
  source 1..19: mol_type = other RNA
cggcctttcagacgtttta

SEQ ID NO: 3228 - RNA, 19 nt, synthetic construct
  misc_feature 1..19: note = Description of Artificial Sequence: Synthetic oligonucleotide
  source 1..19: mol_type = other RNA
acggcctttcagacgtttt

SEQ ID NO: 3229 - RNA, 19 nt, synthetic construct
  misc_feature 1..19: note = Description of Artificial Sequence: Synthetic oligonucleotide
  source 1..19: mol_type = other RNA
aacggcctttcagacgttt

SEQ ID NO: 3230 - RNA, 19 nt, synthetic construct
  misc_feature 1..19: note = Description of Artificial Sequence: Synthetic oligonucleotide
  source 1..19: mol_type = other RNA
gaacggcctttcagacgtt

SEQ ID NO: 3231 - RNA, 19 nt, synthetic construct
  misc_feature 1..19: note = Description of Artificial Sequence: Synthetic oligonucleotide
  source 1..19: mol_type = other RNA
ggaacggcctttcagacgt

SEQ ID NO: 3232 - RNA, 19 nt, synthetic construct
  misc_feature 1..19: note = Description of Artificial Sequence: Synthetic oligonucleotide
  source 1..19: mol_type = other RNA
aggaacggcctttcagacg

SEQ ID NO: 3233 - RNA, 19 nt, synthetic construct
  misc_feature 1..19: note = Description of Artificial Sequence: Synthetic oligonucleotide
  source 1..19: mol_type = other RNA
caggaacggcctttcagac

SEQ ID NO: 3234 - RNA, 19 nt, synthetic construct
  misc_feature 1..19: note = Description of Artificial Sequence: Synthetic oligonucleotide
  source 1..19: mol_type = other RNA
gcaggaacggcctttcaga

SEQ ID NO: 3235 - RNA, 19 nt, synthetic construct
  misc_feature 1..19: note = Description of Artificial Sequence: Synthetic oligonucleotide
  source 1..19: mol_type = other RNA
ggcaggaacggcctttcag

SEQ ID NO: 3236 - RNA, 19 nt, synthetic construct
  misc_feature 1..19: note = Description of Artificial Sequence: Synthetic oligonucleotide
  source 1..19: mol_type = other RNA
tggcaggaacggcctttca

SEQ ID NO: 3237 - RNA, 19 nt, synthetic construct
  misc_feature 1..19: note = Description of Artificial Sequence: Synthetic oligonucleotide
  source 1..19: mol_type = other RNA
ctggcaggaacggcctttc

SEQ ID NO: 3238 - RNA, 19 nt, synthetic construct
  misc_feature 1..19: note = Description of Artificial Sequence: Synthetic oligonucleotide
  source 1..19: mol_type = other RNA
tctggcaggaacggccttt

SEQ ID NO: 3239 - RNA, 19 nt, synthetic construct
  misc_feature 1..19: note = Description of Artificial Sequence: Synthetic oligonucleotide
  source 1..19: mol_type = other RNA
ctctggcaggaacggcctt

SEQ ID NO: 3240 - RNA, 19 nt, synthetic construct
  misc_feature 1..19: note = Description of Artificial Sequence: Synthetic oligonucleotide
  source 1..19: mol_type = other RNA
actctggcaggaacggcct

SEQ ID NO: 3241 - RNA, 19 nt, synthetic construct
  misc_feature 1..19: note = Description of Artificial Sequence: Synthetic oligonucleotide
  source 1..19: mol_type = other RNA
gactctggcaggaacggcc

SEQ ID NO: 3242 - RNA, 19 nt, synthetic construct
  misc_feature 1..19: note = Description of Artificial Sequence: Synthetic oligonucleotide
  source 1..19: mol_type = other RNA
ggactctggcaggaacggc

SEQ ID NO: 3243 - RNA, 19 nt, synthetic construct
  misc_feature 1..19: note = Description of Artificial Sequence: Synthetic oligonucleotide
  source 1..19: mol_type = other RNA
gggactctggcaggaacgg

SEQ ID NO: 3244 - RNA, 19 nt, synthetic construct
  misc_feature 1..19: note = Description of Artificial Sequence: Synthetic oligonucleotide
  source 1..19: mol_type = other RNA
agggactctggcaggaacg

SEQ ID NO: 3245 - RNA, 19 nt, synthetic construct
  misc_feature 1..19: note = Description of Artificial Sequence: Synthetic oligonucleotide
  source 1..19: mol_type = other RNA
cagggactctggcaggaac

SEQ ID NO: 3246 - RNA, 19 nt, synthetic construct
  misc_feature 1..19: note = Description of Artificial Sequence: Synthetic oligonucleotide
  source 1..19: mol_type = other RNA
gcagggactctggcaggaa

SEQ ID NO: 3247 - RNA, 19 nt, synthetic construct
  misc_feature 1..19: note = Description of Artificial Sequence: Synthetic oligonucleotide
  source 1..19: mol_type = other RNA
agcagggactctggcagga

SEQ ID NO: 3248 - RNA, 19 nt, synthetic construct
  misc_feature 1..19: note = Description of Artificial Sequence: Synthetic oligonucleotide
  source 1..19: mol_type = other RNA
tagcagggactctggcagg

SEQ ID NO: 3249 - RNA, 19 nt, synthetic construct
  misc_feature 1..19: note = Description of Artificial Sequence: Synthetic oligonucleotide
  source 1..19: mol_type = other RNA
gtagcagggactctggcag

SEQ ID NO: 3250 - RNA, 19 nt, synthetic construct
  misc_feature 1..19: note = Description of Artificial Sequence: Synthetic oligonucleotide
  source 1..19: mol_type = other RNA
ggtagcagggactctggca

SEQ ID NO: 3251 - RNA, 19 nt, synthetic construct
  misc_feature 1..19: note = Description of Artificial Sequence: Synthetic oligonucleotide
  source 1..19: mol_type = other RNA
aggtagcagggactctggc

SEQ ID NO: 3252 - RNA, 19 nt, synthetic construct
  misc_feature 1..19: note = Description of Artificial Sequence: Synthetic oligonucleotide
  source 1..19: mol_type = other RNA
caggtagcagggactctgg

SEQ ID NO: 3253 - RNA, 19 nt, synthetic construct
  misc_feature 1..19: note = Description of Artificial Sequence: Synthetic oligonucleotide
  source 1..19: mol_type = other RNA
acaggtagcagggactctg

SEQ ID NO: 3254 - RNA, 19 nt, synthetic construct
  misc_feature 1..19: note = Description of Artificial Sequence: Synthetic oligonucleotide
  source 1..19: mol_type = other RNA
aacaggtagcagggactct

SEQ ID NO: 3255 - RNA, 19 nt, synthetic construct
  misc_feature 1..19: note = Description of Artificial Sequence: Synthetic oligonucleotide
  source 1..19: mol_type = other RNA
taacaggtagcagggactc

SEQ ID NO: 3256 - RNA, 19 nt, synthetic construct
  misc_feature 1..19: note = Description of Artificial Sequence: Synthetic oligonucleotide
  source 1..19: mol_type = other RNA
gtaacaggtagcagggact

SEQ ID NO: 3257 - RNA, 19 nt, synthetic construct
  misc_feature 1..19: note = Description of Artificial Sequence: Synthetic oligonucleotide
  source 1..19: mol_type = other RNA
ggtaacaggtagcagggac

SEQ ID NO: 3258 - RNA, 19 nt, synthetic construct
  misc_feature 1..19: note = Description of Artificial Sequence: Synthetic oligonucleotide
  source 1..19: mol_type = other RNA
aggtaacaggtagcaggga

SEQ ID NO: 3259 - RNA, 19 nt, synthetic construct
  misc_feature 1..19: note = Description of Artificial Sequence: Synthetic oligonucleotide
  source 1..19: mol_type = other RNA
gaggtaacaggtagcaggg

SEQ ID NO: 3260 - RNA, 19 nt, synthetic construct
  misc_feature 1..19: note = Description of Artificial Sequence: Synthetic oligonucleotide
  source 1..19: mol_type = other RNA
ggaggtaacaggtagcagg

SEQ ID NO: 3261 - RNA, 19 nt, synthetic construct
  misc_feature 1..19: note = Description of Artificial Sequence: Synthetic oligonucleotide
  source 1..19: mol_type = other RNA
tggaggtaacaggtagcag

SEQ ID NO: 3262 - RNA, 19 nt, synthetic construct
  misc_feature 1..19: note = Description of Artificial Sequence: Synthetic oligonucleotide
  source 1..19: mol_type = other RNA
gtggaggtaacaggtagca

SEQ ID NO: 3263 - RNA, 19 nt, synthetic construct
  misc_feature 1..19: note = Description of Artificial Sequence: Synthetic oligonucleotide
  source 1..19: mol_type = other RNA
ggtggaggtaacaggtagc

SEQ ID NO: 3264 - RNA, 19 nt, synthetic construct
  misc_feature 1..19: note = Description of Artificial Sequence: Synthetic oligonucleotide
  source 1..19: mol_type = other RNA
gggtggaggtaacaggtag

SEQ ID NO: 3265 - RNA, 19 nt, synthetic construct
  misc_feature 1..19: note = Description of Artificial Sequence: Synthetic oligonucleotide
  source 1..19: mol_type = other RNA
ggggtggaggtaacaggta

SEQ ID NO: 3266 - RNA, 19 nt, synthetic construct
  misc_feature 1..19: note = Description of Artificial Sequence: Synthetic oligonucleotide
  source 1..19: mol_type = other RNA
aggggtggaggtaacaggt

SEQ ID NO: 3267 - RNA, 19 nt, synthetic construct
  misc_feature 1..19: note = Description of Artificial Sequence: Synthetic oligonucleotide
  source 1..19: mol_type = other RNA
taggggtggaggtaacagg

SEQ ID NO: 3268 - RNA, 19 nt, synthetic construct
  misc_feature 1..19: note = Description of Artificial Sequence: Synthetic oligonucleotide
  source 1..19: mol_type = other RNA
ataggggtggaggtaacag

SEQ ID NO: 3269 - RNA, 19 nt, synthetic construct
  misc_feature 1..19: note = Description of Artificial Sequence: Synthetic oligonucleotide
  source 1..19: mol_type = other RNA
aataggggtggaggtaaca

SEQ ID NO: 3270 - RNA, 19 nt, synthetic construct
  misc_feature 1..19: note = Description of Artificial Sequence: Synthetic oligonucleotide
  source 1..19: mol_type = other RNA
aaataggggtggaggtaac

SEQ ID NO: 3271 - RNA, 19 nt, synthetic construct
  misc_feature 1..19: note = Description of Artificial Sequence: Synthetic oligonucleotide
  source 1..19: mol_type = other RNA
taaataggggtggaggtaa

SEQ ID NO: 3272 - RNA, 19 nt, synthetic construct
  misc_feature 1..19: note = Description of Artificial Sequence: Synthetic oligonucleotide
  source 1..19: mol_type = other RNA
ctaaataggggtggaggta

SEQ ID NO: 3273 - RNA, 19 nt, synthetic construct
  misc_feature 1..19: note = Description of Artificial Sequence: Synthetic oligonucleotide
  source 1..19: mol_type = other RNA
actaaataggggtggaggt

SEQ ID NO: 3274 - RNA, 19 nt, synthetic construct
  misc_feature 1..19: note = Description of Artificial Sequence: Synthetic oligonucleotide
  source 1..19: mol_type = other RNA
gactaaataggggtggagg

SEQ ID NO: 3275 - RNA, 19 nt, synthetic construct
  misc_feature 1..19: note = Description of Artificial Sequence: Synthetic oligonucleotide
  source 1..19: mol_type = other RNA
ggactaaataggggtggag

SEQ ID NO: 3276 - RNA, 19 nt, synthetic construct
  misc_feature 1..19: note = Description of Artificial Sequence: Synthetic oligonucleotide
  source 1..19: mol_type = other RNA
aggactaaataggggtgga

SEQ ID NO: 3277 - RNA, 19 nt, synthetic construct
  misc_feature 1..19: note = Description of Artificial Sequence: Synthetic oligonucleotide
  source 1..19: mol_type = other RNA
taggactaaataggggtgg

SEQ ID NO: 3278 - RNA, 19 nt, synthetic construct
  misc_feature 1..19: note = Description of Artificial Sequence: Synthetic oligonucleotide
  source 1..19: mol_type = other RNA
ctaggactaaataggggtg

SEQ ID NO: 3279 - RNA, 19 nt, synthetic construct
  misc_feature 1..19: note = Description of Artificial Sequence: Synthetic oligonucleotide
  source 1..19: mol_type = other RNA
actaggactaaataggggt

SEQ ID NO: 3280 - RNA, 19 nt, synthetic construct
  misc_feature 1..19: note = Description of Artificial Sequence: Synthetic oligonucleotide
  source 1..19: mol_type = other RNA
cactaggactaaatagggg

SEQ ID NO: 3281 - RNA, 19 nt, synthetic construct
  misc_feature 1..19: note = Description of Artificial Sequence: Synthetic oligonucleotide
  source 1..19: mol_type = other RNA
ccactaggactaaataggg

SEQ ID NO: 3282 - RNA, 19 nt, synthetic construct
  misc_feature 1..19: note = Description of Artificial Sequence: Synthetic oligonucleotide
  source 1..19: mol_type = other RNA
tccactaggactaaatagg

SEQ ID NO: 3283 - RNA, 19 nt, synthetic construct
  misc_feature 1..19: note = Description of Artificial Sequence: Synthetic oligonucleotide
  source 1..19: mol_type = other RNA
gtccactaggactaaatag

SEQ ID NO: 3284 - RNA, 19 nt, synthetic construct
  misc_feature 1..19: note = Description of Artificial Sequence: Synthetic oligonucleotide
  source 1..19: mol_type = other RNA
tgtccactaggactaaata

SEQ ID NO: 3285 - RNA, 19 nt, synthetic construct
  misc_feature 1..19: note = Description of Artificial Sequence: Synthetic oligonucleotide
  source 1..19: mol_type = other RNA
ctgtccactaggactaaat

SEQ ID NO: 3286 - RNA, 19 nt, synthetic construct
  misc_feature 1..19: note = Description of Artificial Sequence: Synthetic oligonucleotide
  source 1..19: mol_type = other RNA
gctgtccactaggactaaa

SEQ ID NO: 3287 - RNA, 19 nt, synthetic construct
  misc_feature 1..19: note = Description of Artificial Sequence: Synthetic oligonucleotide
  source 1..19: mol_type = other RNA
ggctgtccactaggactaa

SEQ ID NO: 3288 - RNA, 19 nt, synthetic construct
  misc_feature 1..19: note = Description of Artificial Sequence: Synthetic oligonucleotide
  source 1..19: mol_type = other RNA
aggctgtccactaggacta

SEQ ID NO: 3289 - RNA, 19 nt, synthetic construct
  misc_feature 1..19: note = Description of Artificial Sequence: Synthetic oligonucleotide
  source 1..19: mol_type = other RNA
gaggctgtccactaggact

SEQ ID NO: 3290 - RNA, 19 nt, synthetic construct
  misc_feature 1..19: note = Description of Artificial Sequence: Synthetic oligonucleotide
  source 1..19: mol_type = other RNA
cgaggctgtccactaggac

SEQ ID NO: 3291 - RNA, 19 nt, synthetic construct
  misc_feature 1..19: note = Description of Artificial Sequence: Synthetic oligonucleotide
  source 1..19: mol_type = other RNA
gcgaggctgtccactagga

SEQ ID NO: 3292 - RNA, 19 nt, synthetic construct
  misc_feature 1..19: note = Description of Artificial Sequence: Synthetic oligonucleotide
  source 1..19: mol_type = other RNA
agcgaggctgtccactagg

SEQ ID NO: 3293 - RNA, 19 nt, synthetic construct
  misc_feature 1..19: note = Description of Artificial Sequence: Synthetic oligonucleotide
  source 1..19: mol_type = other RNA
gagcgaggctgtccactag

SEQ ID NO: 3294 - RNA, 19 nt, synthetic construct
  misc_feature 1..19: note = Description of Artificial Sequence: Synthetic oligonucleotide
  source 1..19: mol_type = other RNA
tgagcgaggctgtccacta

SEQ ID NO: 3295 - RNA, 19 nt, synthetic construct
  misc_feature 1..19: note = Description of Artificial Sequence: Synthetic oligonucleotide
  source 1..19: mol_type = other RNA
gtgagcgaggctgtccact

SEQ ID NO: 3296 - RNA, 19 nt, synthetic construct
  misc_feature 1..19: note = Description of Artificial Sequence: Synthetic oligonucleotide
  source 1..19: mol_type = other RNA
ggtgagcgaggctgtccac

SEQ ID NO: 3297 - RNA, 19 nt, synthetic construct
  misc_feature 1..19: note = Description of Artificial Sequence: Synthetic oligonucleotide
  source 1..19: mol_type = other RNA
aggtgagcgaggctgtcca

SEQ ID NO: 3298 - RNA, 19 nt, synthetic construct
  misc_feature 1..19: note = Description of Artificial Sequence: Synthetic oligonucleotide
  source 1..19: mol_type = other RNA
aaggtgagcgaggctgtcc

SEQ ID NO: 3299 - RNA, 19 nt, synthetic construct
  misc_feature 1..19: note = Description of Artificial Sequence: Synthetic oligonucleotide
  source 1..19: mol_type = other RNA
gaaggtgagcgaggctgtc

SEQ ID NO: 3300 - RNA, 19 nt, synthetic construct
  misc_feature 1..19: note = Description of Artificial Sequence: Synthetic oligonucleotide
  source 1..19: mol_type = other RNA
ggaaggtgagcgaggctgt

SEQ ID NO: 3301 - RNA, 19 nt, synthetic construct
  misc_feature 1..19: note = Description of Artificial Sequence: Synthetic oligonucleotide
  source 1..19: mol_type = other RNA
gggaaggtgagcgaggctg

SEQ ID NO: 3302 - RNA, 19 nt, synthetic construct
  misc_feature 1..19: note = Description of Artificial Sequence: Synthetic oligonucleotide
  source 1..19: mol_type = other RNA
agggaaggtgagcgaggct

SEQ ID NO: 3303 - RNA, 19 nt, synthetic construct
  misc_feature 1..19: note = Description of Artificial Sequence: Synthetic oligonucleotide
  source 1..19: mol_type = other RNA
cagggaaggtgagcgaggc

SEQ ID NO: 3304 - RNA, 19 nt, synthetic construct
  misc_feature 1..19: note = Description of Artificial Sequence: Synthetic oligonucleotide
  source 1..19: mol_type = other RNA
ccagggaaggtgagcgagg

SEQ ID NO: 3305 - RNA, 19 nt, synthetic construct
  misc_feature 1..19: note = Description of Artificial Sequence: Synthetic oligonucleotide
  source 1..19: mol_type = other RNA
cccagggaaggtgagcgag

SEQ ID NO: 3306 - RNA, 19 nt, synthetic construct
  misc_feature 1..19: note = Description of Artificial Sequence: Synthetic oligonucleotide
  source 1..19: mol_type = other RNA
tcccagggaaggtgagcga

SEQ ID NO: 3307 - RNA, 19 nt, synthetic construct
  misc_feature 1..19: note = Description of Artificial Sequence: Synthetic oligonucleotide
  source 1..19: mol_type = other RNA
atcccagggaaggtgagcg

SEQ ID NO: 3308 - RNA, 19 nt, synthetic construct
  misc_feature 1..19: note = Description of Artificial Sequence: Synthetic oligonucleotide
  source 1..19: mol_type = other RNA
catcccagggaaggtgagc

SEQ ID NO: 3309 - RNA, 19 nt, synthetic construct
  misc_feature 1..19: note = Description of Artificial Sequence: Synthetic oligonucleotide
  source 1..19: mol_type = other RNA
tcatcccagggaaggtgag

SEQ ID NO: 3310 - RNA, 19 nt, synthetic construct
  misc_feature 1..19: note = Description of Artificial Sequence: Synthetic oligonucleotide
  source 1..19: mol_type = other RNA
gtcatcccagggaaggtga

SEQ ID NO: 3311 - RNA, 19 nt, synthetic construct
  misc_feature 1..19: note = Description of Artificial Sequence: Synthetic oligonucleotide
  source 1..19: mol_type = other RNA
tgtcatcccagggaaggtg

SEQ ID NO: 3312 - RNA, 19 nt, synthetic construct
  misc_feature 1..19: note = Description of Artificial Sequence: Synthetic oligonucleotide
  source 1..19: mol_type = other RNA
gtgtcatcccagggaaggt

SEQ ID NO: 3313 - RNA, 19 nt, synthetic construct
  misc_feature 1..19: note = Description of Artificial Sequence: Synthetic oligonucleotide
  source 1..19: mol_type = other RNA
agtgtcatcccagggaagg

SEQ ID NO: 3314 - RNA, 19 nt, synthetic construct
  misc_feature 1..19: note = Description of Artificial Sequence: Synthetic oligonucleotide
  source 1..19: mol_type = other RNA
aagtgtcatcccagggaag

SEQ ID NO: 3315 - RNA, 19 nt, synthetic construct
  misc_feature 1..19: note = Description of Artificial Sequence: Synthetic oligonucleotide
  source 1..19: mol_type = other RNA
gaagtgtcatcccagggaa

SEQ ID NO: 3316 - RNA, 19 nt, synthetic construct
  misc_feature 1..19: note = Description of Artificial Sequence: Synthetic oligonucleotide
  source 1..19: mol_type = other RNA
agaagtgtcatcccaggga

SEQ ID NO: 3317 - RNA, 19 nt, synthetic construct
  misc_feature 1..19: note = Description of Artificial Sequence: Synthetic oligonucleotide
  source 1..19: mol_type = other RNA
cagaagtgtcatcccaggg

SEQ ID NO: 3318 - RNA, 19 nt, synthetic construct
  misc_feature 1..19: note = Description of Artificial Sequence: Synthetic oligonucleotide
  source 1..19: mol_type = other RNA
ccagaagtgtcatcccagg

SEQ ID NO: 3319 - RNA, 19 nt, synthetic construct
  misc_feature 1..19: note = Description of Artificial Sequence: Synthetic oligonucleotide
  source 1..19: mol_type = other RNA
gccagaagtgtcatcccag

SEQ ID NO: 3320 - RNA, 19 nt, synthetic construct
  misc_feature 1..19: note = Description of Artificial Sequence: Synthetic oligonucleotide
  source 1..19: mol_type = other RNA
cgccagaagtgtcatccca

SEQ ID NO: 3321 - RNA, 19 nt, synthetic construct
  misc_feature 1..19: note = Description of Artificial Sequence: Synthetic oligonucleotide
  source 1..19: mol_type = other RNA
ccgccagaagtgtcatccc

SEQ ID NO: 3322 - RNA, 19 nt, synthetic construct
  misc_feature 1..19: note = Description of Artificial Sequence: Synthetic oligonucleotide
  source 1..19: mol_type = other RNA
gccgccagaagtgtcatcc

SEQ ID NO: 3323 - RNA, 19 nt, synthetic construct
  misc_feature 1..19: note = Description of Artificial Sequence: Synthetic oligonucleotide
  source 1..19: mol_type = other RNA
agccgccagaagtgtcatc

SEQ ID NO: 3324 - RNA, 19 nt, synthetic construct
  misc_feature 1..19: note = Description of Artificial Sequence: Synthetic oligonucleotide
  source 1..19: mol_type = other RNA
cagccgccagaagtgtcat

SEQ ID NO: 3325 - RNA, 19 nt, synthetic construct
  misc_feature 1..19: note = Description of Artificial Sequence: Synthetic oligonucleotide
  source 1..19: mol_type = other RNA
tcagccgccagaagtgtca

SEQ ID NO: 3326 - RNA, 19 nt, synthetic construct
  misc_feature 1..19: note = Description of Artificial Sequence: Synthetic oligonucleotide
  source 1..19: mol_type = other RNA
ctcagccgccagaagtgtc

SEQ ID NO: 3327 - RNA, 19 nt, synthetic construct
  misc_feature 1..19: note = Description of Artificial Sequence: Synthetic oligonucleotide
  source 1..19: mol_type = other RNA
tctcagccgccagaagtgt

SEQ ID NO: 3328 - RNA, 19 nt, synthetic construct
  misc_feature 1..19: note = Description of Artificial Sequence: Synthetic oligonucleotide
  source 1..19: mol_type = other RNA
atctcagccgccagaagtg

SEQ ID NO: 3329 - RNA, 19 nt, synthetic construct
  misc_feature 1..19: note = Description of Artificial Sequence: Synthetic oligonucleotide
  source 1..19: mol_type = other RNA
catctcagccgccagaagt

SEQ ID NO: 3330 - RNA, 19 nt, synthetic construct
  misc_feature 1..19: note = Description of Artificial Sequence: Synthetic oligonucleotide
  source 1..19: mol_type = other RNA
tcatctcagccgccagaag

SEQ ID NO: 3331 - RNA, 19 nt, synthetic construct
  misc_feature 1..19: note = Description of Artificial Sequence: Synthetic oligonucleotide
  source 1..19: mol_type = other RNA
ctcatctcagccgccagaa

SEQ ID NO: 3332 - RNA, 19 nt, synthetic construct
  misc_feature 1..19: note = Description of Artificial Sequence: Synthetic oligonucleotide
  source 1..19: mol_type = other RNA
gctcatctcagccgccaga

SEQ ID NO: 3333 - RNA, 19 nt, synthetic construct
  misc_feature 1..19: note = Description of Artificial Sequence: Synthetic oligonucleotide
  source 1..19: mol_type = other RNA
cgctcatctcagccgccag

SEQ ID NO: 3334 - RNA, 19 nt, synthetic construct
  misc_feature 1..19: note = Description of Artificial Sequence: Synthetic oligonucleotide
  source 1..19: mol_type = other RNA
tcgctcatctcagccgcca

SEQ ID NO: 3335 - RNA, 19 nt, synthetic construct
  misc_feature 1..19: note = Description of Artificial Sequence: Synthetic oligonucleotide
  source 1..19: mol_type = other RNA
ctcgctcatctcagccgcc

SEQ ID NO: 3336 - RNA, 19 nt, synthetic construct
  misc_feature 1..19: note = Description of Artificial Sequence: Synthetic oligonucleotide
  source 1..19: mol_type = other RNA
gctcgctcatctcagccgc

SEQ ID NO: 3337 - RNA, 19 nt, synthetic construct
  misc_feature 1..19: note = Description of Artificial Sequence: Synthetic oligonucleotide
  source 1..19: mol_type = other RNA
ggctcgctcatctcagccg

SEQ ID NO: 3338 - RNA, 19 nt, synthetic construct
  misc_feature 1..19: note = Description of Artificial Sequence: Synthetic oligonucleotide
  source 1..19: mol_type = other RNA
aggctcgctcatctcagcc

SEQ ID NO: 3339 - RNA, 19 nt, synthetic construct
  misc_feature 1..19: note = Description of Artificial Sequence: Synthetic oligonucleotide
  source 1..19: mol_type = other RNA
gaggctcgctcatctcagc

SEQ ID NO: 3340 - RNA, 19 nt, synthetic construct
  misc_feature 1..19: note = Description of Artificial Sequence: Synthetic oligonucleotide
  source 1..19: mol_type = other RNA
agaggctcgctcatctcag

SEQ ID NO: 3341 - RNA, 19 nt, synthetic construct
  misc_feature 1..19: note = Description of Artificial Sequence: Synthetic oligonucleotide
  source 1..19: mol_type = other RNA
gagaggctcgctcatctca

SEQ ID NO: 3342 - RNA, 19 nt, synthetic construct
  misc_feature 1..19: note = Description of Artificial Sequence: Synthetic oligonucleotide
  source 1..19: mol_type = other RNA
agagaggctcgctcatctc

SEQ ID NO: 3343 - RNA, 19 nt, synthetic construct
  misc_feature 1..19: note = Description of Artificial Sequence: Synthetic oligonucleotide
  source 1..19: mol_type = other RNA
cagagaggctcgctcatct

SEQ ID NO: 3344 - RNA, 19 nt, synthetic construct
  misc_feature 1..19: note = Description of Artificial Sequence: Synthetic oligonucleotide
  source 1..19: mol_type = other RNA
ccagagaggctcgctcatc

SEQ ID NO: 3345 - RNA, 19 nt, synthetic construct
  misc_feature 1..19: note = Description of Artificial Sequence: Synthetic oligonucleotide
  source 1..19: mol_type = other RNA
cccagagaggctcgctcat

SEQ ID NO: 3346 - RNA, 19 nt, synthetic construct
  misc_feature 1..19: note = Description of Artificial Sequence: Synthetic oligonucleotide
  source 1..19: mol_type = other RNA
gcccagagaggctcgctca

SEQ ID NO: 3347 - RNA, 19 nt, synthetic construct
  misc_feature 1..19: note = Description of Artificial Sequence: Synthetic oligonucleotide
  source 1..19: mol_type = other RNA
agcccagagaggctcgctc

SEQ ID NO: 3348 - RNA, 19 nt, synthetic construct
  misc_feature 1..19: note = Description of Artificial Sequence: Synthetic oligonucleotide
  source 1..19: mol_type = other RNA
gagcccagagaggctcgct

SEQ ID NO: 3349 - RNA, 19 nt, synthetic construct
  misc_feature 1..19: note = Description of Artificial Sequence: Synthetic oligonucleotide
  source 1..19: mol_type = other RNA
agagcccagagaggctcgc

SEQ ID NO: 3350 - RNA, 19 nt, synthetic construct
  misc_feature 1..19: note = Description of Artificial Sequence: Synthetic oligonucleotide
  source 1..19: mol_type = other RNA
cagagcccagagaggctcg

SEQ ID NO: 3351 - RNA, 19 nt, synthetic construct
  misc_feature 1..19: note = Description of Artificial Sequence: Synthetic oligonucleotide
  source 1..19: mol_type = other RNA
gcagagcccagagaggctc

SEQ ID NO: 3352 - RNA, 19 nt, synthetic construct
  misc_feature 1..19: note = Description of Artificial Sequence: Synthetic oligonucleotide
  source 1..19: mol_type = other RNA
ggcagagcccagagaggct

SEQ ID NO: 3353 - RNA, 19 nt, synthetic construct
  misc_feature 1..19: note = Description of Artificial Sequence: Synthetic oligonucleotide
  source 1..19: mol_type = other RNA
cggcagagcccagagaggc

SEQ ID NO: 3354 - RNA, 19 nt, synthetic construct
  misc_feature 1..19: note = Description of Artificial Sequence: Synthetic oligonucleotide
  source 1..19: mol_type = other RNA
gcggcagagcccagagagg

SEQ ID NO: 3355 - RNA, 19 nt, synthetic construct
  misc_feature 1..19: note = Description of Artificial Sequence: Synthetic oligonucleotide
  source 1..19: mol_type = other RNA
ggcggcagagcccagagag

SEQ ID NO: 3356 - RNA, 19 nt, synthetic construct
  misc_feature 1..19: note = Description of Artificial Sequence: Synthetic oligonucleotide
  source 1..19: mol_type = other RNA
cggcggcagagcccagaga

SEQ ID NO: 3357 - RNA, 19 nt, synthetic construct
  misc_feature 1..19: note = Description of Artificial Sequence: Synthetic oligonucleotide
  source 1..19: mol_type = other RNA
ccggcggcagagcccagag

SEQ ID NO: 3358 - RNA, 19 nt, synthetic construct
  misc_feature 1..19: note = Description of Artificial Sequence: Synthetic oligonucleotide
  source 1..19: mol_type = other RNA
cccggcggcagagcccaga

SEQ ID NO: 3359 - RNA, 19 nt, synthetic construct
  misc_feature 1..19: note = Description of Artificial Sequence: Synthetic oligonucleotide
  source 1..19: mol_type = other RNA
acccggcggcagagcccag

SEQ ID NO: 3360 - RNA, 19 nt, synthetic construct
  misc_feature 1..19: note = Description of Artificial Sequence: Synthetic oligonucleotide
  source 1..19: mol_type = other RNA
cacccggcggcagagccca

SEQ ID NO: 3361 - RNA, 19 nt, synthetic construct
  misc_feature 1..19: note = Description of Artificial Sequence: Synthetic oligonucleotide
  source 1..19: mol_type = other RNA
acacccggcggcagagccc

SEQ ID NO: 3362 - RNA, 19 nt, synthetic construct
  misc_feature 1..19: note = Description of Artificial Sequence: Synthetic oligonucleotide
  source 1..19: mol_type = other RNA
cacacccggcggcagagcc

SEQ ID NO: 3363 - RNA, 19 nt, synthetic construct
  misc_feature 1..19: note = Description of Artificial Sequence: Synthetic oligonucleotide
  source 1..19: mol_type = other RNA
ccacacccggcggcagagc

SEQ ID NO: 3364 - RNA, 19 nt, synthetic construct
  misc_feature 1..19: note = Description of Artificial Sequence: Synthetic oligonucleotide
  source 1..19: mol_type = other RNA
cccacacccggcggcagag

SEQ ID NO: 3365 - RNA, 19 nt, synthetic construct
  misc_feature 1..19: note = Description of Artificial Sequence: Synthetic oligonucleotide
  source 1..19: mol_type = other RNA
gcccacacccggcggcaga

SEQ ID NO: 3366 - RNA, 19 nt, synthetic construct
  misc_feature 1..19: note = Description of Artificial Sequence: Synthetic oligonucleotide
  source 1..19: mol_type = other RNA
agcccacacccggcggcag

SEQ ID NO: 3367 - RNA, 19 nt, synthetic construct
  misc_feature 1..19: note = Description of Artificial Sequence: Synthetic oligonucleotide
  source 1..19: mol_type = other RNA
cagcccacacccggcggca

SEQ ID NO: 3368 - RNA, 19 nt, synthetic construct
  misc_feature 1..19: note = Description of Artificial Sequence: Synthetic oligonucleotide
  source 1..19: mol_type = other RNA
tcagcccacacccggcggc

SEQ ID NO: 3369 - RNA, 19 nt, synthetic construct
  misc_feature 1..19: note = Description of Artificial Sequence: Synthetic oligonucleotide
  source 1..19: mol_type = other RNA
gtcagcccacacccggcgg

SEQ ID NO: 3370 - RNA, 19 nt, synthetic construct
  misc_feature 1..19: note = Description of Artificial Sequence: Synthetic oligonucleotide
  source 1..19: mol_type = other RNA
ggtcagcccacacccggcg

SEQ ID NO: 3371 - RNA, 19 nt, synthetic construct
  misc_feature 1..19: note = Description of Artificial Sequence: Synthetic oligonucleotide
  source 1..19: mol_type = other RNA
aggtcagcccacacccggc

SEQ ID NO: 3372 - RNA, 19 nt, synthetic construct
  misc_feature 1..19: note = Description of Artificial Sequence: Synthetic oligonucleotide
  source 1..19: mol_type = other RNA
caggtcagcccacacccgg

SEQ ID NO: 3373 - RNA, 19 nt, synthetic construct
  misc_feature 1..19: note = Description of Artificial Sequence: Synthetic oligonucleotide
  source 1..19: mol_type = other RNA
gcaggtcagcccacacccg

SEQ ID NO: 3374 - RNA, 19 nt, synthetic construct
  misc_feature 1..19: note = Description of Artificial Sequence: Synthetic oligonucleotide
  source 1..19: mol_type = other RNA
ggcaggtcagcccacaccc

SEQ ID NO: 3375 - RNA, 19 nt, synthetic construct
  misc_feature 1..19: note = Description of Artificial Sequence: Synthetic oligonucleotide
  source 1..19: mol_type = other RNA
aggcaggtcagcccacacc

SEQ ID NO: 3376 - RNA, 19 nt, synthetic construct
  misc_feature 1..19: note = Description of Artificial Sequence: Synthetic oligonucleotide
  source 1..19: mol_type = other RNA
taggcaggtcagcccacac

SEQ ID NO: 3377 - RNA, 19 nt, synthetic construct
  misc_feature 1..19: note = Description of Artificial Sequence: Synthetic oligonucleotide
  source 1..19: mol_type = other RNA
gtaggcaggtcagcccaca

SEQ ID NO: 3378 - RNA, 19 nt, synthetic construct
  misc_feature 1..19: note = Description of Artificial Sequence: Synthetic oligonucleotide
  source 1..19: mol_type = other RNA
tgtaggcaggtcagcccac

SEQ ID NO: 3379 - RNA, 19 nt, synthetic construct
  misc_feature 1..19: note = Description of Artificial Sequence: Synthetic oligonucleotide
  source 1..19: mol_type = other RNA
ctgtaggcaggtcagccca

SEQ ID NO: 3380 - RNA, 19 nt, synthetic construct
  misc_feature 1..19: note = Description of Artificial Sequence: Synthetic oligonucleotide
  source 1..19: mol_type = other RNA
gctgtaggcaggtcagccc

SEQ ID NO: 3381 - RNA, 19 nt, synthetic construct
  misc_feature 1..19: note = Description of Artificial Sequence: Synthetic oligonucleotide
  source 1..19: mol_type = other RNA
agctgtaggcaggtcagcc

SEQ ID NO: 3382 - RNA, 19 nt, synthetic construct
  misc_feature 1..19: note = Description of Artificial Sequence: Synthetic oligonucleotide
  source 1..19: mol_type = other RNA
cagctgtaggcaggtcagc

SEQ ID NO: 3383 - RNA, 19 nt, synthetic construct
  misc_feature 1..19: note = Description of Artificial Sequence: Synthetic oligonucleotide
  source 1..19: mol_type = other RNA
ccagctgtaggcaggtcag

SEQ ID NO: 3384 - RNA, 19 nt, synthetic construct
  misc_feature 1..19: note = Description of Artificial Sequence: Synthetic oligonucleotide
  source 1..19: mol_type = other RNA
cccagctgtaggcaggtca

SEQ ID NO: 3385 - RNA, 19 nt, synthetic construct
  misc_feature 1..19: note = Description of Artificial Sequence: Synthetic oligonucleotide
  source 1..19: mol_type = other RNA
ccccagctgtaggcaggtc

SEQ ID NO: 3386 - RNA, 19 nt, synthetic construct
  misc_feature 1..19: note = Description of Artificial Sequence: Synthetic oligonucleotide
  source 1..19: mol_type = other RNA
gccccagctgtaggcaggt

SEQ ID NO: 3387 - RNA, 19 nt, synthetic construct
  misc_feature 1..19: note = Description of Artificial Sequence: Synthetic oligonucleotide
  source 1..19: mol_type = other RNA
ggccccagctgtaggcagg

SEQ ID NO: 3388 - RNA, 19 nt, synthetic construct
  misc_feature 1..19: note = Description of Artificial Sequence: Synthetic oligonucleotide
  source 1..19: mol_type = other RNA
aggccccagctgtaggcag

SEQ ID NO: 3389 - RNA, 19 nt, synthetic construct
  misc_feature 1..19: note = Description of Artificial Sequence: Synthetic oligonucleotide
  source 1..19: mol_type = other RNA
caggccccagctgtaggca

SEQ ID NO: 3390 - RNA, 19 nt, synthetic construct
  misc_feature 1..19: note = Description of Artificial Sequence: Synthetic oligonucleotide
  source 1..19: mol_type = other RNA
tcaggccccagctgtaggc

SEQ ID NO: 3391 - RNA, 19 nt, synthetic construct
  misc_feature 1..19: note = Description of Artificial Sequence: Synthetic oligonucleotide
  source 1..19: mol_type = other RNA
atcaggccccagctgtagg

SEQ ID NO: 3392 - RNA, 19 nt, synthetic construct
  misc_feature 1..19: note = Description of Artificial Sequence: Synthetic oligonucleotide
  source 1..19: mol_type = other RNA
tatcaggccccagctgtag

SEQ ID NO: 3393 - RNA, 19 nt, synthetic construct
  misc_feature 1..19: note = Description of Artificial Sequence: Synthetic oligonucleotide
  source 1..19: mol_type = other RNA
ttatcaggccccagctgta

SEQ ID NO: 3394 - RNA, 19 nt, synthetic construct
  misc_feature 1..19: note = Description of Artificial Sequence: Synthetic oligonucleotide
  source 1..19: mol_type = other RNA
cttatcaggccccagctgt

SEQ ID NO: 3395 - RNA, 19 nt, synthetic construct
  misc_feature 1..19: note = Description of Artificial Sequence: Synthetic oligonucleotide
  source 1..19: mol_type = other RNA
ccttatcaggccccagctg

SEQ ID NO: 3396 - RNA, 19 nt, synthetic construct
  misc_feature 1..19: note = Description of Artificial Sequence: Synthetic oligonucleotide
  source 1..19: mol_type = other RNA
gccttatcaggccccagct

SEQ ID NO: 3397 - RNA, 19 nt, synthetic construct
  misc_feature 1..19: note = Description of Artificial Sequence: Synthetic oligonucleotide
  source 1..19: mol_type = other RNA
tgccttatcaggccccagc

SEQ ID NO: 3398 - RNA, 19 nt, synthetic construct
  misc_feature 1..19: note = Description of Artificial Sequence: Synthetic oligonucleotide
  source 1..19: mol_type = other RNA
ctgccttatcaggccccag

SEQ ID NO: 3399 - RNA, 19 nt, synthetic construct
  misc_feature 1..19: note = Description of Artificial Sequence: Synthetic oligonucleotide
  source 1..19: mol_type = other RNA
gctgccttatcaggcccca

SEQ ID NO: 3400 - RNA, 19 nt, synthetic construct
  misc_feature 1..19: note = Description of Artificial Sequence: Synthetic oligonucleotide
  source 1..19: mol_type = other RNA
tgctgccttatcaggcccc

SEQ ID NO: 3401 - RNA, 19 nt, synthetic construct
  misc_feature 1..19: note = Description of Artificial Sequence: Synthetic oligonucleotide
  source 1..19: mol_type = other RNA
ctgctgccttatcaggccc

SEQ ID NO: 3402 - RNA, 19 nt, synthetic construct
  misc_feature 1..19: note = Description of Artificial Sequence: Synthetic oligonucleotide
  source 1..19: mol_type = other RNA
gctgctgccttatcaggcc

SEQ ID NO: 3403 - RNA, 19 nt, synthetic construct
  misc_feature 1..19: note = Description of Artificial Sequence: Synthetic oligonucleotide
  source 1..19: mol_type = other RNA
tgctgctgccttatcaggc

SEQ ID NO: 3404 - RNA, 19 nt, synthetic construct
  misc_feature 1..19: note = Description of Artificial Sequence: Synthetic oligonucleotide
  source 1..19: mol_type = other RNA
ttgctgctgccttatcagg

SEQ ID NO: 3405 - RNA, 19 nt, synthetic construct
  misc_feature 1..19: note = Description of Artificial Sequence: Synthetic oligonucleotide
  source 1..19: mol_type = other RNA
tttgctgctgccttatcag

SEQ ID NO: 3406 - RNA, 19 nt, synthetic construct
  misc_feature 1..19: note = Description of Artificial Sequence: Synthetic oligonucleotide
  source 1..19: mol_type = other RNA
ttttgctgctgccttatca

SEQ ID NO: 3407 - RNA, 19 nt, synthetic construct
  misc_feature 1..19: note = Description of Artificial Sequence: Synthetic oligonucleotide
  source 1..19: mol_type = other RNA
cttttgctgctgccttatc

SEQ ID NO: 3408 - RNA, 19 nt, synthetic construct
  misc_feature 1..19: note = Description of Artificial Sequence: Synthetic oligonucleotide
  source 1..19: mol_type = other RNA
ccttttgctgctgccttat

SEQ ID NO: 3409 - RNA, 19 nt, synthetic construct
  misc_feature 1..19: note = Description of Artificial Sequence: Synthetic oligonucleotide
  source 1..19: mol_type = other RNA
cccttttgctgctgcctta

SEQ ID NO: 3410 - RNA, 19 nt, synthetic construct
  misc_feature 1..19: note = Description of Artificial Sequence: Synthetic oligonucleotide
  source 1..19: mol_type = other RNA
acccttttgctgctgcctt

SEQ ID NO: 3411 - RNA, 19 nt, synthetic construct
  misc_feature 1..19: note = Description of Artificial Sequence: Synthetic oligonucleotide
  source 1..19: mol_type = other RNA
cacccttttgctgctgcct

SEQ ID NO: 3412 - RNA, 19 nt, synthetic construct
  misc_feature 1..19: note = Description of Artificial Sequence: Synthetic oligonucleotide
  source 1..19: mol_type = other RNA
ccacccttttgctgctgcc

SEQ ID NO: 3413 - RNA, 19 nt, synthetic construct
  misc_feature 1..19: note = Description of Artificial Sequence: Synthetic oligonucleotide
  source 1..19: mol_type = other RNA
tccacccttttgctgctgc

SEQ ID NO: 3414 - RNA, 19 nt, synthetic construct
  misc_feature 1..19: note = Description of Artificial Sequence: Synthetic oligonucleotide
  source 1..19: mol_type = other RNA
ctccacccttttgctgctg

SEQ ID NO: 3415 - RNA, 19 nt, synthetic construct
  misc_feature 1..19: note = Description of Artificial Sequence: Synthetic oligonucleotide
  source 1..19: mol_type = other RNA
cctccacccttttgctgct

SEQ ID NO: 3416 - RNA, 19 nt, synthetic construct
  misc_feature 1..19: note = Description of Artificial Sequence: Synthetic oligonucleotide
  source 1..19: mol_type = other RNA
ccctccacccttttgctgc

SEQ ID NO: 3417 - RNA, 19 nt, synthetic construct
  misc_feature 1..19: note = Description of Artificial Sequence: Synthetic oligonucleotide
  source 1..19: mol_type = other RNA
cccctccacccttttgctg

SEQ ID NO: 3418 - RNA, 19 nt, synthetic construct
  misc_feature 1..19: note = Description of Artificial Sequence: Synthetic oligonucleotide
  source 1..19: mol_type = other RNA
tcccctccacccttttgct

SEQ ID NO: 3419 - RNA, 19 nt, synthetic construct
  misc_feature 1..19: note = Description of Artificial Sequence: Synthetic oligonucleotide
  source 1..19: mol_type = other RNA
ctcccctccacccttttgc

SEQ ID NO: 3420 - RNA, 19 nt, synthetic construct
  misc_feature 1..19: note = Description of Artificial Sequence: Synthetic oligonucleotide
  source 1..19: mol_type = other RNA
cctcccctccacccttttg

SEQ ID NO: 3421 - RNA, 19 nt, synthetic construct
  misc_feature 1..19: note = Description of Artificial Sequence: Synthetic oligonucleotide
  source 1..19: mol_type = other RNA
gcctcccctccaccctttt

SEQ ID NO: 3422 - RNA, 19 nt, synthetic construct
  misc_feature 1..19: note = Description of Artificial Sequence: Synthetic oligonucleotide
  source 1..19: mol_type = other RNA
tgcctcccctccacccttt

SEQ ID NO: 3423 - RNA, 19 nt, synthetic construct
  misc_feature 1..19: note = Description of Artificial Sequence: Synthetic oligonucleotide
  source 1..19: mol_type = other RNA
ctgcctcccctccaccctt

SEQ ID NO: 3424 - RNA, 19 nt, synthetic construct
  misc_feature 1..19: note = Description of Artificial Sequence: Synthetic oligonucleotide
  source 1..19: mol_type = other RNA
actgcctcccctccaccct

SEQ ID NO: 3425 - RNA, 19 nt, synthetic construct
  misc_feature 1..19: note = Description of Artificial Sequence: Synthetic oligonucleotide
  source 1..19: mol_type = other RNA
cactgcctcccctccaccc

SEQ ID NO: 3426 - RNA, 19 nt, synthetic construct
  misc_feature 1..19: note = Description of Artificial Sequence: Synthetic oligonucleotide
  source 1..19: mol_type = other RNA
acactgcctcccctccacc

SEQ ID NO: 3427 - RNA, 19 nt, synthetic construct
  misc_feature 1..19: note = Description of Artificial Sequence: Synthetic oligonucleotide
  source 1..19: mol_type = other RNA
aacactgcctcccctccac

SEQ ID NO: 3428 - RNA, 19 nt, synthetic construct
  misc_feature 1..19: note = Description of Artificial Sequence: Synthetic oligonucleotide
  source 1..19: mol_type = other RNA
caacactgcctcccctcca

SEQ ID NO: 3429 - RNA, 19 nt, synthetic construct
  misc_feature 1..19: note = Description of Artificial Sequence: Synthetic oligonucleotide
  source 1..19: mol_type = other RNA
tcaacactgcctcccctcc

SEQ ID NO: 3430 - RNA, 19 nt, synthetic construct
  misc_feature 1..19: note = Description of Artificial Sequence: Synthetic oligonucleotide
  source 1..19: mol_type = other RNA
ttcaacactgcctcccctc

SEQ ID NO: 3431 - RNA, 19 nt, synthetic construct
  misc_feature 1..19: note = Description of Artificial Sequence: Synthetic oligonucleotide
  source 1..19: mol_type = other RNA
cttcaacactgcctcccct

SEQ ID NO: 3432 - RNA, 19 nt, synthetic construct
  misc_feature 1..19: note = Description of Artificial Sequence: Synthetic oligonucleotide
  source 1..19: mol_type = other RNA
gcttcaacactgcctcccc

SEQ ID NO: 3433 - RNA, 19 nt, synthetic construct
  misc_feature 1..19: note = Description of Artificial Sequence: Synthetic oligonucleotide
  source 1..19: mol_type = other RNA
agcttcaacactgcctccc

SEQ ID NO: 3434 - RNA, 19 nt, synthetic construct
  misc_feature 1..19: note = Description of Artificial Sequence: Synthetic oligonucleotide
  source 1..19: mol_type = other RNA
cagcttcaacactgcctcc

SEQ ID NO: 3435 - RNA, 19 nt, synthetic construct
  misc_feature 1..19: note = Description of Artificial Sequence: Synthetic oligonucleotide
  source 1..19: mol_type = other RNA
ccagcttcaacactgcctc

SEQ ID NO: 3436 - RNA, 19 nt, synthetic construct
  misc_feature 1..19: note = Description of Artificial Sequence: Synthetic oligonucleotide
  source 1..19: mol_type = other RNA
cccagcttcaacactgcct

SEQ ID NO: 3437 - RNA, 19 nt, synthetic construct
  misc_feature 1..19: note = Description of Artificial Sequence: Synthetic oligonucleotide
  source 1..19: mol_type = other RNA
ccccagcttcaacactgcc

SEQ ID NO: 3438 - RNA, 19 nt, synthetic construct
  misc_feature 1..19: note = Description of Artificial Sequence: Synthetic oligonucleotide
  source 1..19: mol_type = other RNA
gccccagcttcaacactgc

SEQ ID NO: 3439 - RNA, 19 nt, synthetic construct
  misc_feature 1..19: note = Description of Artificial Sequence: Synthetic oligonucleotide
  source 1..19: mol_type = other RNA
tgccccagcttcaacactg

SEQ ID NO: 3440 - RNA, 19 nt, synthetic construct
  misc_feature 1..19: note = Description of Artificial Sequence: Synthetic oligonucleotide
  source 1..19: mol_type = other RNA
ttgccccagcttcaacact

SEQ ID NO: 3441 - RNA, 19 nt, synthetic construct
  misc_feature 1..19: note = Description of Artificial Sequence: Synthetic oligonucleotide
  source 1..19: mol_type = other RNA
cttgccccagcttcaacac

SEQ ID NO: 3442 - RNA, 19 nt, synthetic construct
  misc_feature 1..19: note = Description of Artificial Sequence: Synthetic oligonucleotide
  source 1..19: mol_type = other RNA
acttgccccagcttcaaca

SEQ ID NO: 3443 - RNA, 19 nt, synthetic construct
  misc_feature 1..19: note = Description of Artificial Sequence: Synthetic oligonucleotide
  source 1..19: mol_type = other RNA
tacttgccccagcttcaac

SEQ ID NO: 3444 - RNA, 19 nt, synthetic construct
  misc_feature 1..19: note = Description of Artificial Sequence: Synthetic oligonucleotide
  source 1..19: mol_type = other RNA
ttacttgccccagcttcaa

SEQ ID NO: 3445 - RNA, 19 nt, synthetic construct
  misc_feature 1..19: note = Description of Artificial Sequence: Synthetic oligonucleotide
  source 1..19: mol_type = other RNA
attacttgccccagcttca

SEQ ID NO: 3446 - RNA, 19 nt, synthetic construct
  misc_feature 1..19: note = Description of Artificial Sequence: Synthetic oligonucleotide
  source 1..19: mol_type = other RNA
aattacttgccccagcttc

SEQ ID NO: 3447 - RNA, 19 nt, synthetic construct
  misc_feature 1..19: note = Description of Artificial Sequence: Synthetic oligonucleotide
  source 1..19: mol_type = other RNA
aaattacttgccccagctt

SEQ ID NO: 3448 - RNA, 19 nt, synthetic construct
  misc_feature 1..19: note = Description of Artificial Sequence: Synthetic oligonucleotide
  source 1..19: mol_type = other RNA
aaaattacttgccccagct

SEQ ID NO: 3449 - RNA, 19 nt, synthetic construct
  misc_feature 1..19: note = Description of Artificial Sequence: Synthetic oligonucleotide
  source 1..19: mol_type = other RNA
gaaaattacttgccccagc

SEQ ID NO: 3450 - RNA, 19 nt, synthetic construct
  misc_feature 1..19: note = Description of Artificial Sequence: Synthetic oligonucleotide
  source 1..19: mol_type = other RNA
ggaaaattacttgccccag

SEQ ID NO: 3451 - RNA, 19 nt, synthetic construct
  misc_feature 1..19: note = Description of Artificial Sequence: Synthetic oligonucleotide
  source 1..19: mol_type = other RNA
gggaaaattacttgcccca

SEQ ID NO: 3452 - RNA, 19 nt, synthetic construct
  misc_feature 1..19: note = Description of Artificial Sequence: Synthetic oligonucleotide
  source 1..19: mol_type = other RNA
ggggaaaattacttgcccc

SEQ ID NO: 3453 - RNA, 19 nt, synthetic construct
  misc_feature 1..19: note = Description of Artificial Sequence: Synthetic oligonucleotide
  source 1..19: mol_type = other RNA
tggggaaaattacttgccc

SEQ ID NO: 3454 - RNA, 19 nt, synthetic construct
  misc_feature 1..19: note = Description of Artificial Sequence: Synthetic oligonucleotide
  source 1..19: mol_type = other RNA
ttggggaaaattacttgcc

SEQ ID NO: 3455 - RNA, 19 nt, synthetic construct
  misc_feature 1..19: note = Description of Artificial Sequence: Synthetic oligonucleotide
  source 1..19: mol_type = other RNA
attggggaaaattacttgc

SEQ ID NO: 3456 - RNA, 19 nt, synthetic construct
  misc_feature 1..19: note = Description of Artificial Sequence: Synthetic oligonucleotide
  source 1..19: mol_type = other RNA
aattggggaaaattacttg

SEQ ID NO: 3457 - RNA, 19 nt, synthetic construct
  misc_feature 1..19: note = Description of Artificial Sequence: Synthetic oligonucleotide
  source 1..19: mol_type = other RNA
aaattggggaaaattactt

SEQ ID NO: 3458 - RNA, 19 nt, synthetic construct
  misc_feature 1..19: note = Description of Artificial Sequence: Synthetic oligonucleotide
  source 1..19: mol_type = other RNA
taaattggggaaaattact

SEQ ID NO: 3459 - RNA, 19 nt, synthetic construct
  misc_feature 1..19: note = Description of Artificial Sequence: Synthetic oligonucleotide
  source 1..19: mol_type = other RNA
gtaaattggggaaaattac

SEQ ID NO: 3460 - RNA, 19 nt, synthetic construct
  misc_feature 1..19: note = Description of Artificial Sequence: Synthetic oligonucleotide
  source 1..19: mol_type = other RNA
tgtaaattggggaaaatta

SEQ ID NO: 3461 - RNA, 19 nt, synthetic construct
  misc_feature 1..19: note = Description of Artificial Sequence: Synthetic oligonucleotide
  source 1..19: mol_type = other RNA
ctgtaaattggggaaaatt

SEQ ID NO: 3462 - RNA, 19 nt, synthetic construct
  misc_feature 1..19: note = Description of Artificial Sequence: Synthetic oligonucleotide
  source 1..19: mol_type = other RNA
cctgtaaattggggaaaat

SEQ ID NO: 3463 - RNA, 19 nt, synthetic construct
  misc_feature 1..19: note = Description of Artificial Sequence: Synthetic oligonucleotide
  source 1..19: mol_type = other RNA
ccctgtaaattggggaaaa

SEQ ID NO: 3464 - RNA, 19 nt, synthetic construct
  misc_feature 1..19: note = Description of Artificial Sequence: Synthetic oligonucleotide
  source 1..19: mol_type = other RNA
tccctgtaaattggggaaa

SEQ ID NO: 3465 - RNA, 19 nt, synthetic construct
  misc_feature 1..19: note = Description of Artificial Sequence: Synthetic oligonucleotide
  source 1..19: mol_type = other RNA
ttccctgtaaattggggaa

SEQ ID NO: 3466 - RNA, 19 nt, synthetic construct
  misc_feature 1..19: note = Description of Artificial Sequence: Synthetic oligonucleotide
  source 1..19: mol_type = other RNA
tttccctgtaaattgggga

SEQ ID NO: 3467 - RNA, 19 nt, synthetic construct
  misc_feature 1..19: note = Description of Artificial Sequence: Synthetic oligonucleotide
  source 1..19: mol_type = other RNA
ttttccctgtaaattgggg

SEQ ID NO: 3468 - RNA, 19 nt, synthetic construct
  misc_feature 1..19: note = Description of Artificial Sequence: Synthetic oligonucleotide
  source 1..19: mol_type = other RNA
tttttccctgtaaattggg

SEQ ID NO: 3469 - RNA, 19 nt, synthetic construct
  misc_feature 1..19: note = Description of Artificial Sequence: Synthetic oligonucleotide
  source 1..19: mol_type = other RNA
gtttttccctgtaaattgg

SEQ ID NO: 3470 - RNA, 19 nt, synthetic construct
  misc_feature 1..19: note = Description of Artificial Sequence: Synthetic oligonucleotide
  source 1..19: mol_type = other RNA
ggtttttccctgtaaattg

SEQ ID NO: 3471 - RNA, 19 nt, synthetic construct
  misc_feature 1..19: note = Description of Artificial Sequence: Synthetic oligonucleotide
  source 1..19: mol_type = other RNA
cggtttttccctgtaaatt

SEQ ID NO: 3472 - RNA, 19 nt, synthetic construct
  misc_feature 1..19: note = Description of Artificial Sequence: Synthetic oligonucleotide
  source 1..19: mol_type = other RNA
tcggtttttccctgtaaat

SEQ ID NO: 3473 - RNA, 19 nt, synthetic construct
  misc_feature 1..19: note = Description of Artificial Sequence: Synthetic oligonucleotide
  source 1..19: mol_type = other RNA
ttcggtttttccctgtaaa

SEQ ID NO: 3474 - RNA, 19 nt, synthetic construct
  misc_feature 1..19: note = Description of Artificial Sequence: Synthetic oligonucleotide
  source 1..19: mol_type = other RNA
tttcggtttttccctgtaa

SEQ ID NO: 3475 - RNA, 19 nt, synthetic construct
  misc_feature 1..19: note = Description of Artificial Sequence: Synthetic oligonucleotide
  source 1..19: mol_type = other RNA
atttcggtttttccctgta

SEQ ID NO: 3476 - RNA, 19 nt, synthetic construct
  misc_feature 1..19: note = Description of Artificial Sequence: Synthetic oligonucleotide
  source 1..19: mol_type = other RNA
aatttcggtttttccctgt

SEQ ID NO: 3477 - RNA, 19 nt, synthetic construct
  misc_feature 1..19: note = Description of Artificial Sequence: Synthetic oligonucleotide
  source 1..19: mol_type = other RNA
gaatttcggtttttccctg

SEQ ID NO: 3478 - RNA, 19 nt, synthetic construct
  misc_feature 1..19: note = Description of Artificial Sequence: Synthetic oligonucleotide
  source 1..19: mol_type = other RNA
tgaatttcggtttttccct

SEQ ID NO: 3479 - RNA, 19 nt, synthetic construct
  misc_feature 1..19: note = Description of Artificial Sequence: Synthetic oligonucleotide
  source 1..19: mol_type = other RNA
ctgaatttcggtttttccc

SEQ ID NO: 3480 - RNA, 19 nt, synthetic construct
  misc_feature 1..19: note = Description of Artificial Sequence: Synthetic oligonucleotide
  source 1..19: mol_type = other RNA
tctgaatttcggtttttcc

SEQ ID NO: 3481 - RNA, 19 nt, synthetic construct
  misc_feature 1..19: note = Description of Artificial Sequence: Synthetic oligonucleotide
  source 1..19: mol_type = other RNA
ttctgaatttcggtttttc

SEQ ID NO: 3482 - RNA, 19 nt, synthetic construct
  misc_feature 1..19: note = Description of Artificial Sequence: Synthetic oligonucleotide
  source 1..19: mol_type = other RNA
tttctgaatttcggttttt

SEQ ID NO: 3483 - RNA, 19 nt, synthetic construct
  misc_feature 1..19: note = Description of Artificial Sequence: Synthetic oligonucleotide
  source 1..19: mol_type = other RNA
ttttctgaatttcggtttt

SEQ ID NO: 3484 - RNA, 19 nt, synthetic construct
  misc_feature 1..19: note = Description of Artificial Sequence: Synthetic oligonucleotide
  source 1..19: mol_type = other RNA
cttttctgaatttcggttt

SEQ ID NO: 3485 - RNA, 19 nt, synthetic construct
  misc_feature 1..19: note = Description of Artificial Sequence: Synthetic oligonucleotide
  source 1..19: mol_type = other RNA
acttttctgaatttcggtt

SEQ ID NO: 3486 - RNA, 19 nt, synthetic construct
  misc_feature 1..19: note = Description of Artificial Sequence: Synthetic oligonucleotide
  source 1..19: mol_type = other RNA
aacttttctgaatttcggt

SEQ ID NO: 3487 - RNA, 19 nt, synthetic construct
  misc_feature 1..19: note = Description of Artificial Sequence: Synthetic oligonucleotide
  source 1..19: mol_type = other RNA
aaacttttctgaatttcgg

SEQ ID NO: 3488 - RNA, 19 nt, synthetic construct
  misc_feature 1..19: note = Description of Artificial Sequence: Synthetic oligonucleotide
  source 1..19: mol_type = other RNA
taaacttttctgaatttcg

SEQ ID NO: 3489 - RNA, 19 nt, synthetic construct
  misc_feature 1..19: note = Description of Artificial Sequence: Synthetic oligonucleotide
  source 1..19: mol_type = other RNA
ttaaacttttctgaatttc

SEQ ID NO: 3490 - RNA, 19 nt, synthetic construct
  misc_feature 1..19: note = Description of Artificial Sequence: Synthetic oligonucleotide
  source 1..19: mol_type = other RNA
attaaacttttctgaattt

SEQ ID NO: 3491 - RNA, 19 nt, synthetic construct
  misc_feature 1..19: note = Description of Artificial Sequence: Synthetic oligonucleotide
  source 1..19: mol_type = other RNA
cattaaacttttctgaatt

SEQ ID NO: 3492 - RNA, 19 nt, synthetic construct
  misc_feature 1..19: note = Description of Artificial Sequence: Synthetic oligonucleotide
  source 1..19: mol_type = other RNA
acattaaacttttctgaat

SEQ ID NO: 3493 - RNA, 19 nt, synthetic construct
  misc_feature 1..19: note = Description of Artificial Sequence: Synthetic oligonucleotide
  source 1..19: mol_type = other RNA
gacattaaacttttctgaa

SEQ ID NO: 3494 - RNA, 19 nt, synthetic construct
  misc_feature 1..19: note = Description of Artificial Sequence: Synthetic oligonucleotide
  source 1..19: mol_type = other RNA
tgacattaaacttttctga

SEQ ID NO: 3495 - RNA, 19 nt, synthetic construct
  misc_feature 1..19: note = Description of Artificial Sequence: Synthetic oligonucleotide
  source 1..19: mol_type = other RNA
gtgacattaaacttttctg

SEQ ID NO: 3496 - RNA, 19 nt, synthetic construct
  misc_feature 1..19: note = Description of Artificial Sequence: Synthetic oligonucleotide
  source 1..19: mol_type = other RNA
ggtgacattaaacttttct

SEQ ID NO: 3497 - RNA, 19 nt, synthetic construct
  misc_feature 1..19: note = Description of Artificial Sequence: Synthetic oligonucleotide
  source 1..19: mol_type = other RNA
gggtgacattaaacttttc

SEQ ID NO: 3498 - RNA, 19 nt, synthetic construct
  misc_feature 1..19: note = Description of Artificial Sequence: Synthetic oligonucleotide
  source 1..19: mol_type = other RNA
tgggtgacattaaactttt

SEQ ID NO: 3499 - RNA, 19 nt, synthetic construct
  misc_feature 1..19: note = Description of Artificial Sequence: Synthetic oligonucleotide
  source 1..19: mol_type = other RNA
ctgggtgacattaaacttt

SEQ ID NO: 3500 - RNA, 19 nt, synthetic construct
  misc_feature 1..19: note = Description of Artificial Sequence: Synthetic oligonucleotide
  source 1..19: mol_type = other RNA
cctgggtgacattaaactt

SEQ ID NO: 3501 - RNA, 19 nt, synthetic construct
  misc_feature 1..19: note = Description of Artificial Sequence: Synthetic oligonucleotide
  source 1..19: mol_type = other RNA
ccctgggtgacattaaact

SEQ ID NO: 3502 - RNA, 19 nt, synthetic construct
  misc_feature 1..19: note = Description of Artificial Sequence: Synthetic oligonucleotide
  source 1..19: mol_type = other RNA
cccctgggtgacattaaac

SEQ ID NO: 3503 - RNA, 19 nt, synthetic construct
  misc_feature 1..19: note = Description of Artificial Sequence: Synthetic oligonucleotide
  source 1..19: mol_type = other RNA
gcccctgggtgacattaaa

SEQ ID NO: 3504 - RNA, 19 nt, synthetic construct
  misc_feature 1..19: note = Description of Artificial Sequence: Synthetic oligonucleotide
  source 1..19: mol_type = other RNA
agcccctgggtgacattaa

SEQ ID NO: 3505 - RNA, 19 nt, synthetic construct
  misc_feature 1..19: note = Description of Artificial Sequence: Synthetic oligonucleotide
  source 1..19: mol_type = other RNA
cagcccctgggtgacatta

SEQ ID NO: 3506 - RNA, 19 nt, synthetic construct
  misc_feature 1..19: note = Description of Artificial Sequence: Synthetic oligonucleotide
  source 1..19: mol_type = other RNA
ccagcccctgggtgacatt

SEQ ID NO: 3507 - RNA, 19 nt, synthetic construct
  misc_feature 1..19: note = Description of Artificial Sequence: Synthetic oligonucleotide
  source 1..19: mol_type = other RNA
tccagcccctgggtgacat

SEQ ID NO: 3508 - RNA, 19 nt, synthetic construct
  misc_feature 1..19: note = Description of Artificial Sequence: Synthetic oligonucleotide
  source 1..19: mol_type = other RNA
ctccagcccctgggtgaca

SEQ ID NO: 3509 - RNA, 19 nt, synthetic construct
  misc_feature 1..19: note = Description of Artificial Sequence: Synthetic oligonucleotide
  source 1..19: mol_type = other RNA
gctccagcccctgggtgac

SEQ ID NO: 3510 - RNA, 19 nt, synthetic construct
  misc_feature 1..19: note = Description of Artificial Sequence: Synthetic oligonucleotide
  source 1..19: mol_type = other RNA
ggctccagcccctgggtga

SEQ ID NO: 3511 - RNA, 19 nt, synthetic construct
  misc_feature 1..19: note = Description of Artificial Sequence: Synthetic oligonucleotide
  source 1..19: mol_type = other RNA
gggctccagcccctgggtg

SEQ ID NO: 3512 - RNA, 19 nt, synthetic construct
  misc_feature 1..19: note = Description of Artificial Sequence: Synthetic oligonucleotide
  source 1..19: mol_type = other RNA
tgggctccagcccctgggt

SEQ ID NO: 3513 - RNA, 19 nt, synthetic construct
  misc_feature 1..19: note = Description of Artificial Sequence: Synthetic oligonucleotide
  source 1..19: mol_type = other RNA
ctgggctccagcccctggg

SEQ ID NO: 3514 - RNA, 19 nt, synthetic construct
  misc_feature 1..19: note = Description of Artificial Sequence: Synthetic oligonucleotide
  source 1..19: mol_type = other RNA
tctgggctccagcccctgg

SEQ ID NO: 3515 - RNA, 19 nt, synthetic construct
  misc_feature 1..19: note = Description of Artificial Sequence: Synthetic oligonucleotide
  source 1..19: mol_type = other RNA
gtctgggctccagcccctg

SEQ ID NO: 3516 - RNA, 19 nt, synthetic construct
  misc_feature 1..19: note = Description of Artificial Sequence: Synthetic oligonucleotide
  source 1..19: mol_type = other RNA
ggtctgggctccagcccct

SEQ ID NO: 3517 - RNA, 19 nt, synthetic construct
  misc_feature 1..19: note = Description of Artificial Sequence: Synthetic oligonucleotide
  source 1..19: mol_type = other RNA
aggtctgggctccagcccc

SEQ ID NO: 3518 - RNA, 19 nt, synthetic construct
  misc_feature 1..19: note = Description of Artificial Sequence: Synthetic oligonucleotide
  source 1..19: mol_type = other RNA
gaggtctgggctccagccc

SEQ ID NO: 3519 - RNA, 19 nt, synthetic construct
  misc_feature 1..19: note = Description of Artificial Sequence: Synthetic oligonucleotide
  source 1..19: mol_type = other RNA
agaggtctgggctccagcc

SEQ ID NO: 3520 - RNA, 19 nt, synthetic construct
  misc_feature 1..19: note = Description of Artificial Sequence: Synthetic oligonucleotide
  source 1..19: mol_type = other RNA
cagaggtctgggctccagc

SEQ ID NO: 3521 - RNA, 19 nt, synthetic construct
  misc_feature 1..19: note = Description of Artificial Sequence: Synthetic oligonucleotide
  source 1..19: mol_type = other RNA
ccagaggtctgggctccag

SEQ ID NO: 3522 - RNA, 19 nt, synthetic construct
  misc_feature 1..19: note = Description of Artificial Sequence: Synthetic oligonucleotide
  source 1..19: mol_type = other RNA
gccagaggtctgggctcca

SEQ ID NO: 3523 - RNA, 19 nt, synthetic construct
  misc_feature 1..19: note = Description of Artificial Sequence: Synthetic oligonucleotide
  source 1..19: mol_type = other RNA
tgccagaggtctgggctcc

SEQ ID NO: 3524 - RNA, 19 nt, synthetic construct
  misc_feature 1..19: note = Description of Artificial Sequence: Synthetic oligonucleotide
  source 1..19: mol_type = other RNA
ctgccagaggtctgggctc

SEQ ID NO: 3525 - RNA, 19 nt, synthetic construct
  misc_feature 1..19: note = Description of Artificial Sequence: Synthetic oligonucleotide
  source 1..19: mol_type = other RNA
gctgccagaggtctgggct

SEQ ID NO: 3526 - RNA, 19 nt, synthetic construct
  misc_feature 1..19: note = Description of Artificial Sequence: Synthetic oligonucleotide
  source 1..19: mol_type = other RNA
agctgccagaggtctgggc

SEQ ID NO: 3527 - RNA, 19 nt, synthetic construct
  misc_feature 1..19: note = Description of Artificial Sequence: Synthetic oligonucleotide
  source 1..19: mol_type = other RNA
gagctgccagaggtctggg

SEQ ID NO: 3528 - RNA, 19 nt, synthetic construct
  misc_feature 1..19: note = Description of Artificial Sequence: Synthetic oligonucleotide
  source 1..19: mol_type = other RNA
agagctgccagaggtctgg

SEQ ID NO: 3529 - RNA, 19 nt, synthetic construct
  misc_feature 1..19: note = Description of Artificial Sequence: Synthetic oligonucleotide
  source 1..19: mol_type = other RNA
gagagctgccagaggtctg

SEQ ID NO: 3530 - RNA, 19 nt, synthetic construct
  misc_feature 1..19: note = Description of Artificial Sequence: Synthetic oligonucleotide
  source 1..19: mol_type = other RNA
tgagagctgccagaggtct

SEQ ID NO: 3531 - RNA, 19 nt, synthetic construct
  misc_feature 1..19: note = Description of Artificial Sequence: Synthetic oligonucleotide
  source 1..19: mol_type = other RNA
gtgagagctgccagaggtc

SEQ ID NO: 3532 - RNA, 19 nt, synthetic construct
  misc_feature 1..19: note = Description of Artificial Sequence: Synthetic oligonucleotide
  source 1..19: mol_type = other RNA
agtgagagctgccagaggt

SEQ ID NO: 3533 - RNA, 19 nt, synthetic construct
  misc_feature 1..19: note = Description of Artificial Sequence: Synthetic oligonucleotide
  source 1..19: mol_type = other RNA
aagtgagagctgccagagg

SEQ ID NO: 3534 - RNA, 19 nt, synthetic construct
  misc_feature 1..19: note = Description of Artificial Sequence: Synthetic oligonucleotide
  source 1..19: mol_type = other RNA
aaagtgagagctgccagag

SEQ ID NO: 3535 - RNA, 19 nt, synthetic construct
  misc_feature 1..19: note = Description of Artificial Sequence: Synthetic oligonucleotide
  source 1..19: mol_type = other RNA
gaaagtgagagctgccaga

SEQ ID NO: 3536 - RNA, 19 nt, synthetic construct
  misc_feature 1..19: note = Description of Artificial Sequence: Synthetic oligonucleotide
  source 1..19: mol_type = other RNA
tgaaagtgagagctgccag

SEQ ID NO: 3537 - RNA, 19 nt, synthetic construct
  misc_feature 1..19: note = Description of Artificial Sequence: Synthetic oligonucleotide
  source 1..19: mol_type = other RNA
gtgaaagtgagagctgcca

SEQ ID NO: 3538 - RNA, 19 nt, synthetic construct
  misc_feature 1..19: note = Description of Artificial Sequence: Synthetic oligonucleotide
  source 1..19: mol_type = other RNA
tgtgaaagtgagagctgcc

SEQ ID NO: 3539 - RNA, 19 nt, synthetic construct
  misc_feature 1..19: note = Description of Artificial Sequence: Synthetic oligonucleotide
  source 1..19: mol_type = other RNA
ttgtgaaagtgagagctgc

SEQ ID NO: 3540 - RNA, 19 nt, synthetic construct
  misc_feature 1..19: note = Description of Artificial Sequence: Synthetic oligonucleotide
  source 1..19: mol_type = other RNA
attgtgaaagtgagagctg

SEQ ID NO: 3541 - RNA, 19 nt, synthetic construct
  misc_feature 1..19: note = Description of Artificial Sequence: Synthetic oligonucleotide
  source 1..19: mol_type = other RNA
cattgtgaaagtgagagct

SEQ ID NO: 3542 - RNA, 19 nt, synthetic construct
  misc_feature 1..19: note = Description of Artificial Sequence: Synthetic oligonucleotide
  source 1..19: mol_type = other RNA
gcattgtgaaagtgagagc

SEQ ID NO: 3543 - RNA, 19 nt, synthetic construct
  misc_feature 1..19: note = Description of Artificial Sequence: Synthetic oligonucleotide
  source 1..19: mol_type = other RNA
ggcattgtgaaagtgagag

SEQ ID NO: 3544 - RNA, 19 nt, synthetic construct
  misc_feature 1..19: note = Description of Artificial Sequence: Synthetic oligonucleotide
  source 1..19: mol_type = other RNA
gggcattgtgaaagtgaga

SEQ ID NO: 3545 - RNA, 19 nt, synthetic construct
  misc_feature 1..19: note = Description of Artificial Sequence: Synthetic oligonucleotide
  source 1..19: mol_type = other RNA
agggcattgtgaaagtgag

SEQ ID NO: 3546 - RNA, 19 nt, synthetic construct
  misc_feature 1..19: note = Description of Artificial Sequence: Synthetic oligonucleotide
  source 1..19: mol_type = other RNA
aagggcattgtgaaagtga

SEQ ID NO: 3547 - RNA, 19 nt, synthetic construct
  misc_feature 1..19: note = Description of Artificial Sequence: Synthetic oligonucleotide
  source 1..19: mol_type = other RNA
caagggcattgtgaaagtg

SEQ ID NO: 3548 - RNA, 19 nt, synthetic construct
  misc_feature 1..19: note = Description of Artificial Sequence: Synthetic oligonucleotide
  source 1..19: mol_type = other RNA
ccaagggcattgtgaaagt

SEQ ID NO: 3549 - RNA, 19 nt, synthetic construct
  misc_feature 1..19: note = Description of Artificial Sequence: Synthetic oligonucleotide
  source 1..19: mol_type = other RNA
cccaagggcattgtgaaag

SEQ ID NO: 3550 - RNA, 19 nt, synthetic construct
  misc_feature 1..19: note = Description of Artificial Sequence: Synthetic oligonucleotide
  source 1..19: mol_type = other RNA
gcccaagggcattgtgaaa

SEQ ID NO: 3551 - RNA, 19 nt, synthetic construct
  misc_feature 1..19: note = Description of Artificial Sequence: Synthetic oligonucleotide
  source 1..19: mol_type = other RNA
agcccaagggcattgtgaa

SEQ ID NO: 3552 - RNA, 19 nt, synthetic construct
  misc_feature 1..19: note = Description of Artificial Sequence: Synthetic oligonucleotide
  source 1..19: mol_type = other RNA
cagcccaagggcattgtga

SEQ ID NO: 3553 - RNA, 19 nt, synthetic construct
  misc_feature 1..19: note = Description of Artificial Sequence: Synthetic oligonucleotide
  source 1..19: mol_type = other RNA
tcagcccaagggcattgtg

SEQ ID NO: 3554 - RNA, 19 nt, synthetic construct
  misc_feature 1..19: note = Description of Artificial Sequence: Synthetic oligonucleotide
  source 1..19: mol_type = other RNA
gtcagcccaagggcattgt

SEQ ID NO: 3555 - RNA, 19 nt, synthetic construct
  misc_feature 1..19: note = Description of Artificial Sequence: Synthetic oligonucleotide
  source 1..19: mol_type = other RNA
agtcagcccaagggcattg

SEQ ID NO: 3556 - RNA, 19 nt, synthetic construct
  misc_feature 1..19: note = Description of Artificial Sequence: Synthetic oligonucleotide
  source 1..19: mol_type = other RNA
tagtcagcccaagggcatt

SEQ ID NO: 3557 - RNA, 19 nt, synthetic construct
  misc_feature 1..19: note = Description of Artificial Sequence: Synthetic oligonucleotide
  source 1..19: mol_type = other RNA
ctagtcagcccaagggcat

SEQ ID NO: 3558 - RNA, 19 nt, synthetic construct
  misc_feature 1..19: note = Description of Artificial Sequence: Synthetic oligonucleotide
  source 1..19: mol_type = other RNA
cctagtcagcccaagggca

SEQ ID NO: 3559 - RNA, 19 nt, synthetic construct
  misc_feature 1..19: note = Description of Artificial Sequence: Synthetic oligonucleotide
  source 1..19: mol_type = other RNA
gcctagtcagcccaagggc

SEQ ID NO: 3560 - RNA, 19 nt, synthetic construct
  misc_feature 1..19: note = Description of Artificial Sequence: Synthetic oligonucleotide
  source 1..19: mol_type = other RNA
agcctagtcagcccaaggg

SEQ ID NO: 3561 - RNA, 19 nt, synthetic construct
  misc_feature 1..19: note = Description of Artificial Sequence: Synthetic oligonucleotide
  source 1..19: mol_type = other RNA
cagcctagtcagcccaagg

SEQ ID NO: 3562 - RNA, 19 nt, synthetic construct
  misc_feature 1..19: note = Description of Artificial Sequence: Synthetic oligonucleotide
  source 1..19: mol_type = other RNA
gcagcctagtcagcccaag

SEQ ID NO: 3563 - RNA, 19 nt, synthetic construct
  misc_feature 1..19: note = Description of Artificial Sequence: Synthetic oligonucleotide
  source 1..19: mol_type = other RNA
tgcagcctagtcagcccaa

SEQ ID NO: 3564 - RNA, 19 nt, synthetic construct
  misc_feature 1..19: note = Description of Artificial Sequence: Synthetic oligonucleotide
  source 1..19: mol_type = other RNA
ctgcagcctagtcagccca

SEQ ID NO: 3565 - RNA, 19 nt, synthetic construct
  misc_feature 1..19: note = Description of Artificial Sequence: Synthetic oligonucleotide
  source 1..19: mol_type = other RNA
tctgcagcctagtcagccc

SEQ ID NO: 3566 - RNA, 19 nt, synthetic construct
  misc_feature 1..19: note = Description of Artificial Sequence: Synthetic oligonucleotide
  source 1..19: mol_type = other RNA
ctctgcagcctagtcagcc

SEQ ID NO: 3567 - RNA, 19 nt, synthetic construct
  misc_feature 1..19: note = Description of Artificial Sequence: Synthetic oligonucleotide
  source 1..19: mol_type = other RNA
cctctgcagcctagtcagc

SEQ ID NO: 3568 - RNA, 19 nt, synthetic construct
  misc_feature 1..19: note = Description of Artificial Sequence: Synthetic oligonucleotide
  source 1..19: mol_type = other RNA
ccctctgcagcctagtcag

SEQ ID NO: 3569 - RNA, 19 nt, synthetic construct
  misc_feature 1..19: note = Description of Artificial Sequence: Synthetic oligonucleotide
  source 1..19: mol_type = other RNA
cccctctgcagcctagtca

SEQ ID NO: 3570 - RNA, 19 nt, synthetic construct
  misc_feature 1..19: note = Description of Artificial Sequence: Synthetic oligonucleotide
  source 1..19: mol_type = other RNA
acccctctgcagcctagtc

SEQ ID NO: 3571 - RNA, 19 nt, synthetic construct
  misc_feature 1..19: note = Description of Artificial Sequence: Synthetic oligonucleotide
  source 1..19: mol_type = other RNA
aacccctctgcagcctagt

SEQ ID NO: 3572 - RNA, 19 nt, synthetic construct
  misc_feature 1..19: note = Description of Artificial Sequence: Synthetic oligonucleotide
  source 1..19: mol_type = other RNA
aaacccctctgcagcctag

SEQ ID NO: 3573 - RNA, 19 nt, synthetic construct
  misc_feature 1..19: note = Description of Artificial Sequence: Synthetic oligonucleotide
  source 1..19: mol_type = other RNA
gaaacccctctgcagccta

SEQ ID NO: 3574 - RNA, 19 nt, synthetic construct
  misc_feature 1..19: note = Description of Artificial Sequence: Synthetic oligonucleotide
  source 1..19: mol_type = other RNA
tgaaacccctctgcagcct

SEQ ID NO: 3575 - RNA, 19 nt, synthetic construct
  misc_feature 1..19: note = Description of Artificial Sequence: Synthetic oligonucleotide
  source 1..19: mol_type = other RNA
gtgaaacccctctgcagcc

SEQ ID NO: 3576 - RNA, 19 nt, synthetic construct
  misc_feature 1..19: note = Description of Artificial Sequence: Synthetic oligonucleotide
  source 1..19: mol_type = other RNA
ggtgaaacccctctgcagc

SEQ ID NO: 3577 - RNA, 19 nt, synthetic construct
  misc_feature 1..19: note = Description of Artificial Sequence: Synthetic oligonucleotide
  source 1..19: mol_type = other RNA
gggtgaaacccctctgcag

SEQ ID NO: 3578 - RNA, 19 nt, synthetic construct
  misc_feature 1..19: note = Description of Artificial Sequence: Synthetic oligonucleotide
  source 1..19: mol_type = other RNA
ggggtgaaacccctctgca

SEQ ID NO: 3579 - RNA, 19 nt, synthetic construct
  misc_feature 1..19: note = Description of Artificial Sequence: Synthetic oligonucleotide
  source 1..19: mol_type = other RNA
tggggtgaaacccctctgc

SEQ ID NO: 3580 - RNA, 19 nt, synthetic construct
  misc_feature 1..19: note = Description of Artificial Sequence: Synthetic oligonucleotide
  source 1..19: mol_type = other RNA
ttggggtgaaacccctctg

SEQ ID NO: 3581 - RNA, 19 nt, synthetic construct
  misc_feature 1..19: note = Description of Artificial Sequence: Synthetic oligonucleotide
  source 1..19: mol_type = other RNA
gttggggtgaaacccctct

SEQ ID NO: 3582 - RNA, 19 nt, synthetic construct
  misc_feature 1..19: note = Description of Artificial Sequence: Synthetic oligonucleotide
  source 1..19: mol_type = other RNA
ggttggggtgaaacccctc

SEQ ID NO: 3583 - RNA, 19 nt, synthetic construct
  misc_feature 1..19: note = Description of Artificial Sequence: Synthetic oligonucleotide
  source 1..19: mol_type = other RNA
gggttggggtgaaacccct

SEQ ID NO: 3584 - RNA, 19 nt, synthetic construct
  misc_feature 1..19: note = Description of Artificial Sequence: Synthetic oligonucleotide
  source 1..19: mol_type = other RNA
ggggttggggtgaaacccc

SEQ ID NO: 3585 - RNA, 19 nt, synthetic construct
  misc_feature 1..19: note = Description of Artificial Sequence: Synthetic oligonucleotide
  source 1..19: mol_type = other RNA
tggggttggggtgaaaccc

SEQ ID NO: 3586 - RNA, 19 nt, synthetic construct
  misc_feature 1..19: note = Description of Artificial Sequence: Synthetic oligonucleotide
  source 1..19: mol_type = other RNA
ctggggttggggtgaaacc

SEQ ID NO: 3587 - RNA, 19 nt, synthetic construct
  misc_feature 1..19: note = Description of Artificial Sequence: Synthetic oligonucleotide
  source 1..19: mol_type = other RNA
cctggggttggggtgaaac

SEQ ID NO: 3588 - RNA, 19 nt, synthetic construct
  misc_feature 1..19: note = Description of Artificial Sequence: Synthetic oligonucleotide
  source 1..19: mol_type = other RNA
ccctggggttggggtgaaa

SEQ ID NO: 3589 - RNA, 19 nt, synthetic construct
  misc_feature 1..19: note = Description of Artificial Sequence: Synthetic oligonucleotide
  source 1..19: mol_type = other RNA
gccctggggttggggtgaa

SEQ ID NO: 3590 - RNA, 19 nt, synthetic construct
  misc_feature 1..19: note = Description of Artificial Sequence: Synthetic oligonucleotide
  source 1..19: mol_type = other RNA
tgccctggggttggggtga

SEQ ID NO: 3591 - RNA, 19 nt, synthetic construct
  misc_feature 1..19: note = Description of Artificial Sequence: Synthetic oligonucleotide
  source 1..19: mol_type = other RNA
gtgccctggggttggggtg

SEQ ID NO: 3592 - RNA, 19 nt, synthetic construct
  misc_feature 1..19: note = Description of Artificial Sequence: Synthetic oligonucleotide
  source 1..19: mol_type = other RNA
ggtgccctggggttggggt

SEQ ID NO: 3593 - RNA, 19 nt, synthetic construct
  misc_feature 1..19: note = Description of Artificial Sequence: Synthetic oligonucleotide
  source 1..19: mol_type = other RNA
aggtgccctggggttgggg

SEQ ID NO: 3594 - RNA, 19 nt, synthetic construct
  misc_feature 1..19: note = Description of Artificial Sequence: Synthetic oligonucleotide
  source 1..19: mol_type = other RNA
gaggtgccctggggttggg

SEQ ID NO: 3595 - RNA, 19 nt, synthetic construct
  misc_feature 1..19: note = Description of Artificial Sequence: Synthetic oligonucleotide
  source 1..19: mol_type = other RNA
tgaggtgccctggggttgg

SEQ ID NO: 3596 - RNA, 19 nt, synthetic construct
  misc_feature 1..19: note = Description of Artificial Sequence: Synthetic oligonucleotide
  source 1..19: mol_type = other RNA
ttgaggtgccctggggttg

SEQ ID NO: 3597 - RNA, 19 nt, synthetic construct
  misc_feature 1..19: note = Description of Artificial Sequence: Synthetic oligonucleotide
  source 1..19: mol_type = other RNA
cttgaggtgccctggggtt

SEQ ID NO: 3598 - RNA, 19 nt, synthetic construct
  misc_feature 1..19: note = Description of Artificial Sequence: Synthetic oligonucleotide
  source 1..19: mol_type = other RNA
acttgaggtgccctggggt

SEQ ID NO: 3599 - RNA, 19 nt, synthetic construct
  misc_feature 1..19: note = Description of Artificial Sequence: Synthetic oligonucleotide
  source 1..19: mol_type = other RNA
cacttgaggtgccctgggg

SEQ ID NO: 3600 - RNA, 19 nt, synthetic construct
  misc_feature 1..19: note = Description of Artificial Sequence: Synthetic oligonucleotide
  source 1..19: mol_type = other RNA
acacttgaggtgccctggg

SEQ ID NO: 3601 - RNA, 19 nt, synthetic construct
  misc_feature 1..19: note = Description of Artificial Sequence: Synthetic oligonucleotide
  source 1..19: mol_type = other RNA
gacacttgaggtgccctgg

SEQ ID NO: 3602 - RNA, 19 nt, synthetic construct
  misc_feature 1..19: note = Description of Artificial Sequence: Synthetic oligonucleotide
  source 1..19: mol_type = other RNA
ggacacttgaggtgccctg

SEQ ID NO: 3603 - RNA, 19 nt, synthetic construct
  misc_feature 1..19: note = Description of Artificial Sequence: Synthetic oligonucleotide
  source 1..19: mol_type = other RNA
gggacacttgaggtgccct

SEQ ID NO: 3604 - RNA, 19 nt, synthetic construct
  misc_feature 1..19: note = Description of Artificial Sequence: Synthetic oligonucleotide
  source 1..19: mol_type = other RNA
ggggacacttgaggtgccc

SEQ ID NO: 3605 - RNA, 19 nt, synthetic construct
  misc_feature 1..19: note = Description of Artificial Sequence: Synthetic oligonucleotide
  source 1..19: mol_type = other RNA
tggggacacttgaggtgcc

SEQ ID NO: 3606 - RNA, 19 nt, synthetic construct
  misc_feature 1..19: note = Description of Artificial Sequence: Synthetic oligonucleotide
  source 1..19: mol_type = other RNA
gtggggacacttgaggtgc

SEQ ID NO: 3607 - RNA, 19 nt, synthetic construct
  misc_feature 1..19: note = Description of Artificial Sequence: Synthetic oligonucleotide
  source 1..19: mol_type = other RNA
ggtggggacacttgaggtg

SEQ ID NO: 3608 - RNA, 19 nt, synthetic construct
  misc_feature 1..19: note = Description of Artificial Sequence: Synthetic oligonucleotide
  source 1..19: mol_type = other RNA
tggtggggacacttgaggt

SEQ ID NO: 3609 - RNA, 19 nt, synthetic construct
  misc_feature 1..19: note = Description of Artificial Sequence: Synthetic oligonucleotide
  source 1..19: mol_type = other RNA
ttggtggggacacttgagg

SEQ ID NO: 3610 - RNA, 19 nt, synthetic construct
  misc_feature 1..19: note = Description of Artificial Sequence: Synthetic oligonucleotide
  source 1..19: mol_type = other RNA
tttggtggggacacttgag

SEQ ID NO: 3611 - RNA, 19 nt, synthetic construct
  misc_feature 1..19: note = Description of Artificial Sequence: Synthetic oligonucleotide
  source 1..19: mol_type = other RNA
gtttggtggggacacttga

SEQ ID NO: 3612 - RNA, 19 nt, synthetic construct
  misc_feature 1..19: note = Description of Artificial Sequence: Synthetic oligonucleotide
  source 1..19: mol_type = other RNA
ggtttggtggggacacttg

SEQ ID NO: 3613 - RNA, 19 nt, synthetic construct
  misc_feature 1..19: note = Description of Artificial Sequence: Synthetic oligonucleotide
  source 1..19: mol_type = other RNA
aggtttggtggggacactt

SEQ ID NO: 3614 - RNA, 19 nt, synthetic construct
  misc_feature 1..19: note = Description of Artificial Sequence: Synthetic oligonucleotide
  source 1..19: mol_type = other RNA
aaggtttggtggggacact

SEQ ID NO: 3615 - RNA, 19 nt, synthetic construct
  misc_feature 1..19: note = Description of Artificial Sequence: Synthetic oligonucleotide
  source 1..19: mol_type = other RNA
gaaggtttggtggggacac

SEQ ID NO: 3616 - RNA, 19 nt, synthetic construct
  misc_feature 1..19: note = Description of Artificial Sequence: Synthetic oligonucleotide
  source 1..19: mol_type = other RNA
ggaaggtttggtggggaca

SEQ ID NO: 3617 - RNA, 19 nt, synthetic construct
  misc_feature 1..19: note = Description of Artificial Sequence: Synthetic oligonucleotide
  source 1..19: mol_type = other RNA
aggaaggtttggtggggac

SEQ ID NO: 3618 - RNA, 19 nt, synthetic construct
  misc_feature 1..19: note = Description of Artificial Sequence: Synthetic oligonucleotide
  source 1..19: mol_type = other RNA
taggaaggtttggtgggga

SEQ ID NO: 3619 - RNA, 19 nt, synthetic construct
  misc_feature 1..19: note = Description of Artificial Sequence: Synthetic oligonucleotide
  source 1..19: mol_type = other RNA
ttaggaaggtttggtgggg

SEQ ID NO: 3620 - RNA, 19 nt, synthetic construct
  misc_feature 1..19: note = Description of Artificial Sequence: Synthetic oligonucleotide
  source 1..19: mol_type = other RNA
gttaggaaggtttggtggg

SEQ ID NO: 3621 - RNA, 19 nt, synthetic construct
  misc_feature 1..19: note = Description of Artificial Sequence: Synthetic oligonucleotide
  source 1..19: mol_type = other RNA
tgttaggaaggtttggtgg

SEQ ID NO: 3622 - RNA, 19 nt, synthetic construct
  misc_feature 1..19: note = Description of Artificial Sequence: Synthetic oligonucleotide
  source 1..19: mol_type = other RNA
gtgttaggaaggtttggtg

SEQ ID NO: 3623 - RNA, 19 nt, synthetic construct
  misc_feature 1..19: note = Description of Artificial Sequence: Synthetic oligonucleotide
  source 1..19: mol_type = other RNA
ggtgttaggaaggtttggt

SEQ ID NO: 3624 - RNA, 19 nt, synthetic construct
  misc_feature 1..19: note = Description of Artificial Sequence: Synthetic oligonucleotide
  source 1..19: mol_type = other RNA
aggtgttaggaaggtttgg

SEQ ID NO: 3625 - RNA, 19 nt, synthetic construct
  misc_feature 1..19: note = Description of Artificial Sequence: Synthetic oligonucleotide
  source 1..19: mol_type = other RNA
caggtgttaggaaggtttg

SEQ ID NO: 3626 - RNA, 19 nt, synthetic construct
  misc_feature 1..19: note = Description of Artificial Sequence: Synthetic oligonucleotide
  source 1..19: mol_type = other RNA
acaggtgttaggaaggttt

SEQ ID NO: 3627 - RNA, 19 nt, synthetic construct
  misc_feature 1..19: note = Description of Artificial Sequence: Synthetic oligonucleotide
  source 1..19: mol_type = other RNA
gacaggtgttaggaaggtt

SEQ ID NO: 3628 - RNA, 19 nt, synthetic construct
  misc_feature 1..19: note = Description of Artificial Sequence: Synthetic oligonucleotide
  source 1..19: mol_type = other RNA
ggacaggtgttaggaaggt

SEQ ID NO: 3629 - RNA, 19 nt, synthetic construct
  misc_feature 1..19: note = Description of Artificial Sequence: Synthetic oligonucleotide
  source 1..19: mol_type = other RNA
tggacaggtgttaggaagg

SEQ ID NO: 3630 - RNA, 19 nt, synthetic construct
  misc_feature 1..19: note = Description of Artificial Sequence: Synthetic oligonucleotide
  source 1..19: mol_type = other RNA
gtggacaggtgttaggaag

SEQ ID NO: 3631 - RNA, 19 nt, synthetic construct
  misc_feature 1..19: note = Description of Artificial Sequence: Synthetic oligonucleotide
  source 1..19: mol_type = other RNA
agtggacaggtgttaggaa

SEQ ID NO: 3632 - RNA, 19 nt, synthetic construct
  misc_feature 1..19: note = Description of Artificial Sequence: Synthetic oligonucleotide
  source 1..19: mol_type = other RNA
tagtggacaggtgttagga

SEQ ID NO: 3633 - RNA, 19 nt, synthetic construct
  misc_feature 1..19: note = Description of Artificial Sequence: Synthetic oligonucleotide
  source 1..19: mol_type = other RNA
ttagtggacaggtgttagg

SEQ ID NO: 3634 - RNA, 19 nt, synthetic construct
  misc_feature 1..19: note = Description of Artificial Sequence: Synthetic oligonucleotide
  source 1..19: mol_type = other RNA
cttagtggacaggtgttag

SEQ ID NO: 3635 - RNA, 19 nt, synthetic construct
  misc_feature 1..19: note = Description of Artificial Sequence: Synthetic oligonucleotide
  source 1..19: mol_type = other RNA
gcttagtggacaggtgtta

SEQ ID NO: 3636 - RNA, 19 nt, synthetic construct
  misc_feature 1..19: note = Description of Artificial Sequence: Synthetic oligonucleotide
  source 1..19: mol_type = other RNA
agcttagtggacaggtgtt

SEQ ID NO: 3637 - RNA, 19 nt, synthetic construct
  misc_feature 1..19: note = Description of Artificial Sequence: Synthetic oligonucleotide
  source 1..19: mol_type = other RNA
cagcttagtggacaggtgt

SEQ ID NO: 3638 - RNA, 19 nt, synthetic construct
  misc_feature 1..19: note = Description of Artificial Sequence: Synthetic oligonucleotide
  source 1..19: mol_type = other RNA
acagcttagtggacaggtg

SEQ ID NO: 3639 - RNA, 19 nt, synthetic construct
  misc_feature 1..19: note = Description of Artificial Sequence: Synthetic oligonucleotide
  source 1..19: mol_type = other RNA
tacagcttagtggacaggt

SEQ ID NO: 3640 - RNA, 19 nt, synthetic construct
  misc_feature 1..19: note = Description of Artificial Sequence: Synthetic oligonucleotide
  source 1..19: mol_type = other RNA
gtacagcttagtggacagg

SEQ ID NO: 3641 - RNA, 19 nt, synthetic construct
  misc_feature 1..19: note = Description of Artificial Sequence: Synthetic oligonucleotide
  source 1..19: mol_type = other RNA
agtacagcttagtggacag

SEQ ID NO: 3642 - RNA, 19 nt, synthetic construct
  misc_feature 1..19: note = Description of Artificial Sequence: Synthetic oligonucleotide
  source 1..19: mol_type = other RNA
tagtacagcttagtggaca

SEQ ID NO: 3643 - RNA, 19 nt, synthetic construct
  misc_feature 1..19: note = Description of Artificial Sequence: Synthetic oligonucleotide
  source 1..19: mol_type = other RNA
ctagtacagcttagtggac

SEQ ID NO: 3644 - RNA, 19 nt, synthetic construct
  misc_feature 1..19: note = Description of Artificial Sequence: Synthetic oligonucleotide
  source 1..19: mol_type = other RNA
cctagtacagcttagtgga

SEQ ID NO: 3645 - RNA, 19 nt, synthetic construct
  misc_feature 1..19: note = Description of Artificial Sequence: Synthetic oligonucleotide
  source 1..19: mol_type = other RNA
gcctagtacagcttagtgg

SEQ ID NO: 3646 - RNA, 19 nt, synthetic construct
  misc_feature 1..19: note = Description of Artificial Sequence: Synthetic oligonucleotide
  source 1..19: mol_type = other RNA
ggcctagtacagcttagtg

SEQ ID NO: 3647 - RNA, 19 nt, synthetic construct
  misc_feature 1..19: note = Description of Artificial Sequence: Synthetic oligonucleotide
  source 1..19: mol_type = other RNA
gggcctagtacagcttagt

SEQ ID NO: 3648 - RNA, 19 nt, synthetic construct
  misc_feature 1..19: note = Description of Artificial Sequence: Synthetic oligonucleotide
  source 1..19: mol_type = other RNA
agggcctagtacagcttag

SEQ ID NO: 3649 - RNA, 19 nt, synthetic construct
  misc_feature 1..19: note = Description of Artificial Sequence: Synthetic oligonucleotide
  source 1..19: mol_type = other RNA
aagggcctagtacagctta

SEQ ID NO: 3650 - RNA, 19 nt, synthetic construct
  misc_feature 1..19: note = Description of Artificial Sequence: Synthetic oligonucleotide
  source 1..19: mol_type = other RNA
caagggcctagtacagctt

SEQ ID NO: 3651 - RNA, 19 nt, synthetic construct
  misc_feature 1..19: note = Description of Artificial Sequence: Synthetic oligonucleotide
  source 1..19: mol_type = other RNA
gcaagggcctagtacagct

SEQ ID NO: 3652 - RNA, 19 nt, synthetic construct
  misc_feature 1..19: note = Description of Artificial Sequence: Synthetic oligonucleotide
  source 1..19: mol_type = other RNA
tgcaagggcctagtacagc

SEQ ID NO: 3653 - RNA, 19 nt, synthetic construct
  misc_feature 1..19: note = Description of Artificial Sequence: Synthetic oligonucleotide
  source 1..19: mol_type = other RNA
ttgcaagggcctagtacag

SEQ ID NO: 3654 - RNA, 19 nt, synthetic construct
  misc_feature 1..19: note = Description of Artificial Sequence: Synthetic oligonucleotide
  source 1..19: mol_type = other RNA
gttgcaagggcctagtaca

SEQ ID NO: 3655 - RNA, 19 nt, synthetic construct
  misc_feature 1..19: note = Description of Artificial Sequence: Synthetic oligonucleotide
  source 1..19: mol_type = other RNA
agttgcaagggcctagtac

SEQ ID NO: 3656 - RNA, 19 nt, synthetic construct
  misc_feature 1..19: note = Description of Artificial Sequence: Synthetic oligonucleotide
  source 1..19: mol_type = other RNA
cagttgcaagggcctagta

SEQ ID NO: 3657 - RNA, 19 nt, synthetic construct
  misc_feature 1..19: note = Description of Artificial Sequence: Synthetic oligonucleotide
  source 1..19: mol_type = other RNA
tcagttgcaagggcctagt

SEQ ID NO: 3658 - RNA, 19 nt, synthetic construct
  misc_feature 1..19: note = Description of Artificial Sequence: Synthetic oligonucleotide
  source 1..19: mol_type = other RNA
gtcagttgcaagggcctag

SEQ ID NO: 3659 - RNA, 19 nt, synthetic construct
  misc_feature 1..19: note = Description of Artificial Sequence: Synthetic oligonucleotide
  source 1..19: mol_type = other RNA
ggtcagttgcaagggccta

SEQ ID NO: 3660 - RNA, 19 nt, synthetic construct
  misc_feature 1..19: note = Description of Artificial Sequence: Synthetic oligonucleotide
  source 1..19: mol_type = other RNA
aggtcagttgcaagggcct

SEQ ID NO: 3661 - RNA, 19 nt, synthetic construct
  misc_feature 1..19: note = Description of Artificial Sequence: Synthetic oligonucleotide
  source 1..19: mol_type = other RNA
taggtcagttgcaagggcc

SEQ ID NO: 3662 - RNA, 19 nt, synthetic construct
  misc_feature 1..19: note = Description of Artificial Sequence: Synthetic oligonucleotide
  source 1..19: mol_type = other RNA
ataggtcagttgcaagggc

SEQ ID NO: 3663 - RNA, 19 nt, synthetic construct
  misc_feature 1..19: note = Description of Artificial Sequence: Synthetic oligonucleotide
  source 1..19: mol_type = other RNA
cataggtcagttgcaaggg

SEQ ID NO: 3664 - RNA, 19 nt, synthetic construct
  misc_feature 1..19: note = Description of Artificial Sequence: Synthetic oligonucleotide
  source 1..19: mol_type = other RNA
ccataggtcagttgcaagg

SEQ ID NO: 3665 - RNA, 19 nt, synthetic construct
  misc_feature 1..19: note = Description of Artificial Sequence: Synthetic oligonucleotide
  source 1..19: mol_type = other RNA
cccataggtcagttgcaag

SEQ ID NO: 3666 - RNA, 19 nt, synthetic construct
  misc_feature 1..19: note = Description of Artificial Sequence: Synthetic oligonucleotide
  source 1..19: mol_type = other RNA
tcccataggtcagttgcaa

SEQ ID NO: 3667 - RNA, 19 nt, synthetic construct
  misc_feature 1..19: note = Description of Artificial Sequence: Synthetic oligonucleotide
  source 1..19: mol_type = other RNA
gtcccataggtcagttgca

SEQ ID NO: 3668 - RNA, 19 nt, synthetic construct
  misc_feature 1..19: note = Description of Artificial Sequence: Synthetic oligonucleotide
  source 1..19: mol_type = other RNA
ggtcccataggtcagttgc

SEQ ID NO: 3669 - RNA, 19 nt, synthetic construct
  misc_feature 1..19: note = Description of Artificial Sequence: Synthetic oligonucleotide
  source 1..19: mol_type = other RNA
aggtcccataggtcagttg

SEQ ID NO: 3670 - RNA, 19 nt, synthetic construct
  misc_feature 1..19: note = Description of Artificial Sequence: Synthetic oligonucleotide
  source 1..19: mol_type = other RNA
caggtcccataggtcagtt

SEQ ID NO: 3671 - RNA, 19 nt, synthetic construct
  misc_feature 1..19: note = Description of Artificial Sequence: Synthetic oligonucleotide
  source 1..19: mol_type = other RNA
tcaggtcccataggtcagt

SEQ ID NO: 3672 - RNA, 19 nt, synthetic construct
  misc_feature 1..19: note = Description of Artificial Sequence: Synthetic oligonucleotide
  source 1..19: mol_type = other RNA
ctcaggtcccataggtcag

SEQ ID NO: 3673 - RNA, 19 nt, synthetic construct
  misc_feature 1..19: note = Description of Artificial Sequence: Synthetic oligonucleotide
  source 1..19: mol_type = other RNA
cctcaggtcccataggtca

SEQ ID NO: 3674 - RNA, 19 nt, synthetic construct
  misc_feature 1..19: note = Description of Artificial Sequence: Synthetic oligonucleotide
  source 1..19: mol_type = other RNA
gcctcaggtcccataggtc

SEQ ID NO: 3675 - RNA, 19 nt, synthetic construct
  misc_feature 1..19: note = Description of Artificial Sequence: Synthetic oligonucleotide
  source 1..19: mol_type = other RNA
ggcctcaggtcccataggt

SEQ ID NO: 3676 - RNA, 19 nt, synthetic construct
  misc_feature 1..19: note = Description of Artificial Sequence: Synthetic oligonucleotide
  source 1..19: mol_type = other RNA
aggcctcaggtcccatagg

SEQ ID NO: 3677 - RNA, 19 nt, synthetic construct
  misc_feature 1..19: note = Description of Artificial Sequence: Synthetic oligonucleotide
  source 1..19: mol_type = other RNA
caggcctcaggtcccatag

SEQ ID NO: 3678 - RNA, 19 nt, synthetic construct
  misc_feature 1..19: note = Description of Artificial Sequence: Synthetic oligonucleotide
  source 1..19: mol_type = other RNA
ccaggcctcaggtcccata

SEQ ID NO: 3679 - RNA, 19 nt, synthetic construct
  misc_feature 1..19: note = Description of Artificial Sequence: Synthetic oligonucleotide
  source 1..19: mol_type = other RNA
gccaggcctcaggtcccat

SEQ ID NO: 3680 - RNA, 19 nt, synthetic construct
  misc_feature 1..19: note = Description of Artificial Sequence: Synthetic oligonucleotide
  source 1..19: mol_type = other RNA
ggccaggcctcaggtccca

SEQ ID NO: 3681 - RNA, 19 nt, synthetic construct
  misc_feature 1..19: note = Description of Artificial Sequence: Synthetic oligonucleotide
  source 1..19: mol_type = other RNA
gggccaggcctcaggtccc

SEQ ID NO: 3682 - RNA, 19 nt, synthetic construct
  misc_feature 1..19: note = Description of Artificial Sequence: Synthetic oligonucleotide
  source 1..19: mol_type = other RNA
ggggccaggcctcaggtcc

SEQ ID NO: 3683 - RNA, 19 nt, synthetic construct
  misc_feature 1..19: note = Description of Artificial Sequence: Synthetic oligonucleotide
  source 1..19: mol_type = other RNA
aggggccaggcctcaggtc

SEQ ID NO: 3684 - RNA, 19 nt, synthetic construct
  misc_feature 1..19: note = Description of Artificial Sequence: Synthetic oligonucleotide
  source 1..19: mol_type = other RNA
gaggggccaggcctcaggt

SEQ ID NO: 3685 - RNA, 19 nt, synthetic construct
  misc_feature 1..19: note = Description of Artificial Sequence: Synthetic oligonucleotide
  source 1..19: mol_type = other RNA
tgaggggccaggcctcagg

SEQ ID NO: 3686 - RNA, 19 nt, synthetic construct
  misc_feature 1..19: note = Description of Artificial Sequence: Synthetic oligonucleotide
  source 1..19: mol_type = other RNA
atgaggggccaggcctcag

SEQ ID NO: 3687 - RNA, 19 nt, synthetic construct
  misc_feature 1..19: note = Description of Artificial Sequence: Synthetic oligonucleotide
  source 1..19: mol_type = other RNA
catgaggggccaggcctca

SEQ ID NO: 3688 - RNA, 19 nt, synthetic construct
  misc_feature 1..19: note = Description of Artificial Sequence: Synthetic oligonucleotide
  source 1..19: mol_type = other RNA
ccatgaggggccaggcctc

SEQ ID NO: 3689 - RNA, 19 nt, synthetic construct
  misc_feature 1..19: note = Description of Artificial Sequence: Synthetic oligonucleotide
  source 1..19: mol_type = other RNA
gccatgaggggccaggcct

SEQ ID NO: 3690 - RNA, 19 nt, synthetic construct
  misc_feature 1..19: note = Description of Artificial Sequence: Synthetic oligonucleotide
  source 1..19: mol_type = other RNA
agccatgaggggccaggcc

SEQ ID NO: 3691 - RNA, 19 nt, synthetic construct
  misc_feature 1..19: note = Description of Artificial Sequence: Synthetic oligonucleotide
  source 1..19: mol_type = other RNA
gagccatgaggggccaggc

SEQ ID NO: 3692 - RNA, 19 nt, synthetic construct
  misc_feature 1..19: note = Description of Artificial Sequence: Synthetic oligonucleotide
  source 1..19: mol_type = other RNA
ggagccatgaggggccagg

SEQ ID NO: 3693 - RNA, 19 nt, synthetic construct
  misc_feature 1..19: note = Description of Artificial Sequence: Synthetic oligonucleotide
  source 1..19: mol_type = other RNA
aggagccatgaggggccag

SEQ ID NO: 3694 - RNA, 19 nt, synthetic construct
  misc_feature 1..19: note = Description of Artificial Sequence: Synthetic oligonucleotide
  source 1..19: mol_type = other RNA
caggagccatgaggggcca

SEQ ID NO: 3695 - RNA, 19 nt, synthetic construct
  misc_feature 1..19: note = Description of Artificial Sequence: Synthetic oligonucleotide
  source 1..19: mol_type = other RNA
acaggagccatgaggggcc

SEQ ID NO: 3696 - RNA, 19 nt, synthetic construct
  misc_feature 1..19: note = Description of Artificial Sequence: Synthetic oligonucleotide
  source 1..19: mol_type = other RNA
gacaggagccatgaggggc

SEQ ID NO: 3697 - RNA, 19 nt, synthetic construct
  misc_feature 1..19: note = Description of Artificial Sequence: Synthetic oligonucleotide
  source 1..19: mol_type = other RNA
tgacaggagccatgagggg

SEQ ID NO: 3698 - RNA, 19 nt, synthetic construct
  misc_feature 1..19: note = Description of Artificial Sequence: Synthetic oligonucleotide
  source 1..19: mol_type = other RNA
gtgacaggagccatgaggg

SEQ ID NO: 3699 - RNA, 19 nt, synthetic construct
  misc_feature 1..19: note = Description of Artificial Sequence: Synthetic oligonucleotide
  source 1..19: mol_type = other RNA
ggtgacaggagccatgagg

SEQ ID NO: 3700 - RNA, 19 nt, synthetic construct
  misc_feature 1..19: note = Description of Artificial Sequence: Synthetic oligonucleotide
  source 1..19: mol_type = other RNA
tggtgacaggagccatgag

SEQ ID NO: 3701 - RNA, 19 nt, synthetic construct
  misc_feature 1..19: note = Description of Artificial Sequence: Synthetic oligonucleotide
  source 1..19: mol_type = other RNA
ctggtgacaggagccatga

SEQ ID NO: 3702 - RNA, 19 nt, synthetic construct
  misc_feature 1..19: note = Description of Artificial Sequence: Synthetic oligonucleotide
  source 1..19: mol_type = other RNA
cctggtgacaggagccatg

SEQ ID NO: 3703 - RNA, 19 nt, synthetic construct
  misc_feature 1..19: note = Description of Artificial Sequence: Synthetic oligonucleotide
  source 1..19: mol_type = other RNA
acctggtgacaggagccat

SEQ ID NO: 3704 - RNA, 19 nt, synthetic construct
  misc_feature 1..19: note = Description of Artificial Sequence: Synthetic oligonucleotide
  source 1..19: mol_type = other RNA
gacctggtgacaggagcca

SEQ ID NO: 3705 - RNA, 19 nt, synthetic construct
  misc_feature 1..19: note = Description of Artificial Sequence: Synthetic oligonucleotide
  source 1..19: mol_type = other RNA
agacctggtgacaggagcc

SEQ ID NO: 3706 - RNA, 19 nt, synthetic construct
  misc_feature 1..19: note = Description of Artificial Sequence: Synthetic oligonucleotide
  source 1..19: mol_type = other RNA
gagacctggtgacaggagc

SEQ ID NO: 3707 - RNA, 19 nt, synthetic construct
  misc_feature 1..19: note = Description of Artificial Sequence: Synthetic oligonucleotide
  source 1..19: mol_type = other RNA
tgagacctggtgacaggag

SEQ ID NO: 3708 - RNA, 19 nt, synthetic construct
  misc_feature 1..19: note = Description of Artificial Sequence: Synthetic oligonucleotide
  source 1..19: mol_type = other RNA
ctgagacctggtgacagga

SEQ ID NO: 3709 - RNA, 19 nt, synthetic construct
  misc_feature 1..19: note = Description of Artificial Sequence: Synthetic oligonucleotide
  source 1..19: mol_type = other RNA
cctgagacctggtgacagg

SEQ ID NO: 3710 - RNA, 19 nt, synthetic construct
  misc_feature 1..19: note = Description of Artificial Sequence: Synthetic oligonucleotide
  source 1..19: mol_type = other RNA
acctgagacctggtgacag

SEQ ID NO: 3711 - RNA, 19 nt, synthetic construct
  misc_feature 1..19: note = Description of Artificial Sequence: Synthetic oligonucleotide
  source 1..19: mol_type = other RNA
gacctgagacctggtgaca

SEQ ID NO: 3712 - RNA, 19 nt, synthetic construct
  misc_feature 1..19: note = Description of Artificial Sequence: Synthetic oligonucleotide
  source 1..19: mol_type = other RNA
tgacctgagacctggtgac

SEQ ID NO: 3713 - RNA, 19 nt, synthetic construct
  misc_feature 1..19: note = Description of Artificial Sequence: Synthetic oligonucleotide
  source 1..19: mol_type = other RNA
ctgacctgagacctggtga

SEQ ID NO: 3714 - RNA, 19 nt, synthetic construct
  misc_feature 1..19: note = Description of Artificial Sequence: Synthetic oligonucleotide
  source 1..19: mol_type = other RNA
cctgacctgagacctggtg

SEQ ID NO: 3715 - RNA, 19 nt, synthetic construct
  misc_feature 1..19: note = Description of Artificial Sequence: Synthetic oligonucleotide
  source 1..19: mol_type = other RNA
ccctgacctgagacctggt

SEQ ID NO: 3716 - RNA, 19 nt, synthetic construct
  misc_feature 1..19: note = Description of Artificial Sequence: Synthetic oligonucleotide
  source 1..19: mol_type = other RNA
accctgacctgagacctgg

SEQ ID NO: 3717 - RNA, 19 nt, synthetic construct
  misc_feature 1..19: note = Description of Artificial Sequence: Synthetic oligonucleotide
  source 1..19: mol_type = other RNA
gaccctgacctgagacctg

SEQ ID NO: 3718 - RNA, 19 nt, synthetic construct
  misc_feature 1..19: note = Description of Artificial Sequence: Synthetic oligonucleotide
  source 1..19: mol_type = other RNA
ggaccctgacctgagacct

SEQ ID NO: 3719 - RNA, 19 nt, synthetic construct
  misc_feature 1..19: note = Description of Artificial Sequence: Synthetic oligonucleotide
  source 1..19: mol_type = other RNA
tggaccctgacctgagacc

SEQ ID NO: 3720 - RNA, 19 nt, synthetic construct
  misc_feature 1..19: note = Description of Artificial Sequence: Synthetic oligonucleotide
  source 1..19: mol_type = other RNA
ctggaccctgacctgagac

SEQ ID NO: 3721 - RNA, 19 nt, synthetic construct
  misc_feature 1..19: note = Description of Artificial Sequence: Synthetic oligonucleotide
  source 1..19: mol_type = other RNA
gctggaccctgacctgaga

SEQ ID NO: 3722 - RNA, 19 nt, synthetic construct
  misc_feature 1..19: note = Description of Artificial Sequence: Synthetic oligonucleotide
  source 1..19: mol_type = other RNA
tgctggaccctgacctgag

SEQ ID NO: 3723 - RNA, 19 nt, synthetic construct
  misc_feature 1..19: note = Description of Artificial Sequence: Synthetic oligonucleotide
  source 1..19: mol_type = other RNA
ctgctggaccctgacctga

SEQ ID NO: 3724 - RNA, 19 nt, synthetic construct
  misc_feature 1..19: note = Description of Artificial Sequence: Synthetic oligonucleotide
  source 1..19: mol_type = other RNA
cctgctggaccctgacctg

SEQ ID NO: 3725 - RNA, 19 nt, synthetic construct
  misc_feature 1..19: note = Description of Artificial Sequence: Synthetic oligonucleotide
  source 1..19: mol_type = other RNA
gcctgctggaccctgacct

SEQ ID NO: 3726 - RNA, 19 nt, synthetic construct
  misc_feature 1..19: note = Description of Artificial Sequence: Synthetic oligonucleotide
  source 1..19: mol_type = other RNA
ggcctgctggaccctgacc

SEQ ID NO: 3727 - RNA, 19 nt, synthetic construct
  misc_feature 1..19: note = Description of Artificial Sequence: Synthetic oligonucleotide
  source 1..19: mol_type = other RNA
gggcctgctggaccctgac

SEQ ID NO: 3728 - RNA, 19 nt, synthetic construct
  misc_feature 1..19: note = Description of Artificial Sequence: Synthetic oligonucleotide
  source 1..19: mol_type = other RNA
agggcctgctggaccctga

SEQ ID NO: 3729 - RNA, 19 nt, synthetic construct
  misc_feature 1..19: note = Description of Artificial Sequence: Synthetic oligonucleotide
  source 1..19: mol_type = other RNA
cagggcctgctggaccctg

SEQ ID NO: 3730 - RNA, 19 nt, synthetic construct
  misc_feature 1..19: note = Description of Artificial Sequence: Synthetic oligonucleotide
  source 1..19: mol_type = other RNA
tcagggcctgctggaccct

SEQ ID NO: 3731 - RNA, 19 nt, synthetic construct
  misc_feature 1..19: note = Description of Artificial Sequence: Synthetic oligonucleotide
  source 1..19: mol_type = other RNA
ctcagggcctgctggaccc

SEQ ID NO: 3732 - RNA, 19 nt, synthetic construct
  misc_feature 1..19: note = Description of Artificial Sequence: Synthetic oligonucleotide
  source 1..19: mol_type = other RNA
gctcagggcctgctggacc

SEQ ID NO: 3733 - RNA, 19 nt, synthetic construct
  misc_feature 1..19: note = Description of Artificial Sequence: Synthetic oligonucleotide
  source 1..19: mol_type = other RNA
agctcagggcctgctggac

SEQ ID NO: 3734 - RNA, 19 nt, synthetic construct
  misc_feature 1..19: note = Description of Artificial Sequence: Synthetic oligonucleotide
  source 1..19: mol_type = other RNA
cagctcagggcctgctgga

SEQ ID NO: 3735 - RNA, 19 nt, synthetic construct
  misc_feature 1..19: note = Description of Artificial Sequence: Synthetic oligonucleotide
  source 1..19: mol_type = other RNA
tcagctcagggcctgctgg

SEQ ID NO: 3736 - RNA, 19 nt, synthetic construct
  misc_feature 1..19: note = Description of Artificial Sequence: Synthetic oligonucleotide
  source 1..19: mol_type = other RNA
gtcagctcagggcctgctg

SEQ ID NO: 3737 - RNA, 19 nt, synthetic construct
  misc_feature 1..19: note = Description of Artificial Sequence: Synthetic oligonucleotide
  source 1..19: mol_type = other RNA
cgtcagctcagggcctgct

SEQ ID NO: 3738 - RNA, 19 nt, synthetic construct
  misc_feature 1..19: note = Description of Artificial Sequence: Synthetic oligonucleotide
  source 1..19: mol_type = other RNA
acgtcagctcagggcctgc

SEQ ID NO: 3739 - RNA, 19 nt, synthetic construct
  misc_feature 1..19: note = Description of Artificial Sequence: Synthetic oligonucleotide
  source 1..19: mol_type = other RNA
cacgtcagctcagggcctg

SEQ ID NO: 3740 - RNA, 19 nt, synthetic construct
  misc_feature 1..19: note = Description of Artificial Sequence: Synthetic oligonucleotide
  source 1..19: mol_type = other RNA
acacgtcagctcagggcct

SEQ ID NO: 3741 - RNA, 19 nt, synthetic construct
  misc_feature 1..19: note = Description of Artificial Sequence: Synthetic oligonucleotide
  source 1..19: mol_type = other RNA
cacacgtcagctcagggcc

SEQ ID NO: 3742 - RNA, 19 nt, synthetic construct
  misc_feature 1..19: note = Description of Artificial Sequence: Synthetic oligonucleotide
  source 1..19: mol_type = other RNA
ccacacgtcagctcagggc

SEQ ID NO: 3743 - RNA, 19 nt, synthetic construct
  misc_feature 1..19: note = Description of Artificial Sequence: Synthetic oligonucleotide
  source 1..19: mol_type = other RNA
tccacacgtcagctcaggg

SEQ ID NO: 3744 - RNA, 19 nt, synthetic construct
  misc_feature 1..19: note = Description of Artificial Sequence: Synthetic oligonucleotide
  source 1..19: mol_type = other RNA
ctccacacgtcagctcagg

SEQ ID NO: 3745 - RNA, 19 nt, synthetic construct
  misc_feature 1..19: note = Description of Artificial Sequence: Synthetic oligonucleotide
  source 1..19: mol_type = other RNA
gctccacacgtcagctcag

SEQ ID NO: 3746 - RNA, 19 nt, synthetic construct
  misc_feature 1..19: note = Description of Artificial Sequence: Synthetic oligonucleotide
  source 1..19: mol_type = other RNA
ggctccacacgtcagctca

SEQ ID NO: 3747 - RNA, 19 nt, synthetic construct
  misc_feature 1..19: note = Description of Artificial Sequence: Synthetic oligonucleotide
  source 1..19: mol_type = other RNA
tggctccacacgtcagctc

SEQ ID NO: 3748 - RNA, 19 nt, synthetic construct
  misc_feature 1..19: note = Description of Artificial Sequence: Synthetic oligonucleotide
  source 1..19: mol_type = other RNA
ctggctccacacgtcagct

SEQ ID NO: 3749 - RNA, 19 nt, synthetic construct
  misc_feature 1..19: note = Description of Artificial Sequence: Synthetic oligonucleotide
  source 1..19: mol_type = other RNA
tctggctccacacgtcagc

SEQ ID NO: 3750 - RNA, 19 nt, synthetic construct
  misc_feature 1..19: note = Description of Artificial Sequence: Synthetic oligonucleotide
  source 1..19: mol_type = other RNA
ctctggctccacacgtcag

SEQ ID NO: 3751 - RNA, 19 nt, synthetic construct
  misc_feature 1..19: note = Description of Artificial Sequence: Synthetic oligonucleotide
  source 1..19: mol_type = other RNA
gctctggctccacacgtca

SEQ ID NO: 3752 - RNA, 19 nt, synthetic construct
  misc_feature 1..19: note = Description of Artificial Sequence: Synthetic oligonucleotide
  source 1..19: mol_type = other RNA
ggctctggctccacacgtc

SEQ ID NO: 3753 - RNA, 19 nt, synthetic construct
  misc_feature 1..19: note = Description of Artificial Sequence: Synthetic oligonucleotide
  source 1..19: mol_type = other RNA
tggctctggctccacacgt

SEQ ID NO: 3754 - RNA, 19 nt, synthetic construct
  misc_feature 1..19: note = Description of Artificial Sequence: Synthetic oligonucleotide
  source 1..19: mol_type = other RNA
gtggctctggctccacacg

SEQ ID NO: 3755 - RNA, 19 nt, synthetic construct
  misc_feature 1..19: note = Description of Artificial Sequence: Synthetic oligonucleotide
  source 1..19: mol_type = other RNA
ggtggctctggctccacac

SEQ ID NO: 3756 - RNA, 19 nt, synthetic construct
  misc_feature 1..19: note = Description of Artificial Sequence: Synthetic oligonucleotide
  source 1..19: mol_type = other RNA
gggtggctctggctccaca

SEQ ID NO: 3757 - RNA, 19 nt, synthetic construct
  misc_feature 1..19: note = Description of Artificial Sequence: Synthetic oligonucleotide
  source 1..19: mol_type = other RNA
tgggtggctctggctccac

SEQ ID NO: 3758 - RNA, 19 nt, synthetic construct
  misc_feature 1..19: note = Description of Artificial Sequence: Synthetic oligonucleotide
  source 1..19: mol_type = other RNA
ttgggtggctctggctcca

SEQ ID NO: 3759 - RNA, 19 nt, synthetic construct
  misc_feature 1..19: note = Description of Artificial Sequence: Synthetic oligonucleotide
  source 1..19: mol_type = other RNA
attgggtggctctggctcc

SEQ ID NO: 3760 - RNA, 19 nt, synthetic construct
  misc_feature 1..19: note = Description of Artificial Sequence: Synthetic oligonucleotide
  source 1..19: mol_type = other RNA
gattgggtggctctggctc

SEQ ID NO: 3761 - RNA, 19 nt, synthetic construct
  misc_feature 1..19: note = Description of Artificial Sequence: Synthetic oligonucleotide
  source 1..19: mol_type = other RNA
ggattgggtggctctggct

SEQ ID NO: 3762 - RNA, 19 nt, synthetic construct
  misc_feature 1..19: note = Description of Artificial Sequence: Synthetic oligonucleotide
  source 1..19: mol_type = other RNA
gggattgggtggctctggc

SEQ ID NO: 3763 - RNA, 19 nt, synthetic construct
  misc_feature 1..19: note = Description of Artificial Sequence: Synthetic oligonucleotide
  source 1..19: mol_type = other RNA
cgggattgggtggctctgg

SEQ ID NO: 3764 - RNA, 19 nt, synthetic construct
  misc_feature 1..19: note = Description of Artificial Sequence: Synthetic oligonucleotide
  source 1..19: mol_type = other RNA
acgggattgggtggctctg

SEQ ID NO: 3765 - RNA, 19 nt, synthetic construct
  misc_feature 1..19: note = Description of Artificial Sequence: Synthetic oligonucleotide
  source 1..19: mol_type = other RNA
tacgggattgggtggctct

SEQ ID NO: 3766 - RNA, 19 nt, synthetic construct
  misc_feature 1..19: note = Description of Artificial Sequence: Synthetic oligonucleotide
  source 1..19: mol_type = other RNA
ctacgggattgggtggctc

SEQ ID NO: 3767 - RNA, 19 nt, synthetic construct
  misc_feature 1..19: note = Description of Artificial Sequence: Synthetic oligonucleotide
  source 1..19: mol_type = other RNA
cctacgggattgggtggct

SEQ ID NO: 3768 - RNA, 19 nt, synthetic construct
  misc_feature 1..19: note = Description of Artificial Sequence: Synthetic oligonucleotide
  source 1..19: mol_type = other RNA
ccctacgggattgggtggc

SEQ ID NO: 3769 - RNA, 19 nt, synthetic construct
  misc_feature 1..19: note = Description of Artificial Sequence: Synthetic oligonucleotide
  source 1..19: mol_type = other RNA
tccctacgggattgggtgg

SEQ ID NO: 3770 - RNA, 19 nt, synthetic construct
  misc_feature 1..19: note = Description of Artificial Sequence: Synthetic oligonucleotide
  source 1..19: mol_type = other RNA
gtccctacgggattgggtg

SEQ ID NO: 3771 - RNA, 19 nt, synthetic construct
  misc_feature 1..19: note = Description of Artificial Sequence: Synthetic oligonucleotide
  source 1..19: mol_type = other RNA
tgtccctacgggattgggt

SEQ ID NO: 3772 - RNA, 19 nt, synthetic construct
  misc_feature 1..19: note = Description of Artificial Sequence: Synthetic oligonucleotide
  source 1..19: mol_type = other RNA
ctgtccctacgggattggg

SEQ ID NO: 3773 - RNA, 19 nt, synthetic construct
  misc_feature 1..19: note = Description of Artificial Sequence: Synthetic oligonucleotide
  source 1..19: mol_type = other RNA
cctgtccctacgggattgg

SEQ ID NO: 3774 - RNA, 19 nt, synthetic construct
  misc_feature 1..19: note = Description of Artificial Sequence: Synthetic oligonucleotide
  source 1..19: mol_type = other RNA
acctgtccctacgggattg

SEQ ID NO: 3775 - RNA, 19 nt, synthetic construct
  misc_feature 1..19: note = Description of Artificial Sequence: Synthetic oligonucleotide
  source 1..19: mol_type = other RNA
aacctgtccctacgggatt

SEQ ID NO: 3776 - RNA, 19 nt, synthetic construct
  misc_feature 1..19: note = Description of Artificial Sequence: Synthetic oligonucleotide
  source 1..19: mol_type = other RNA
aaacctgtccctacgggat

SEQ ID NO: 3777 - RNA, 19 nt, synthetic construct
  misc_feature 1..19: note = Description of Artificial Sequence: Synthetic oligonucleotide
  source 1..19: mol_type = other RNA
gaaacctgtccctacggga

SEQ ID NO: 3778 - RNA, 19 nt, synthetic construct
  misc_feature 1..19: note = Description of Artificial Sequence: Synthetic oligonucleotide
  source 1..19: mol_type = other RNA
tgaaacctgtccctacggg

SEQ ID NO: 3779 - RNA, 19 nt, synthetic construct
  misc_feature 1..19: note = Description of Artificial Sequence: Synthetic oligonucleotide
  source 1..19: mol_type = other RNA
gtgaaacctgtccctacgg

SEQ ID NO: 3780 - RNA, 19 nt, synthetic construct
  misc_feature 1..19: note = Description of Artificial Sequence: Synthetic oligonucleotide
  source 1..19: mol_type = other RNA
tgtgaaacctgtccctacg

SEQ ID NO: 3781 - RNA, 19 nt, synthetic construct
  misc_feature 1..19: note = Description of Artificial Sequence: Synthetic oligonucleotide
  source 1..19: mol_type = other RNA
ttgtgaaacctgtccctac

SEQ ID NO: 3782 - RNA, 19 nt, synthetic construct
  misc_feature 1..19: note = Description of Artificial Sequence: Synthetic oligonucleotide
  source 1..19: mol_type = other RNA
gttgtgaaacctgtcccta

SEQ ID NO: 3783 - RNA, 19 nt, synthetic construct
  misc_feature 1..19: note = Description of Artificial Sequence: Synthetic oligonucleotide
  source 1..19: mol_type = other RNA
agttgtgaaacctgtccct

SEQ ID NO: 3784 - RNA, 19 nt, synthetic construct
  misc_feature 1..19: note = Description of Artificial Sequence: Synthetic oligonucleotide
  source 1..19: mol_type = other RNA
aagttgtgaaacctgtccc

SEQ ID NO: 3785 - RNA, 19 nt, synthetic construct
  misc_feature 1..19: note = Description of Artificial Sequence: Synthetic oligonucleotide
  source 1..19: mol_type = other RNA
gaagttgtgaaacctgtcc

SEQ ID NO: 3786 - RNA, 19 nt, synthetic construct
  misc_feature 1..19: note = Description of Artificial Sequence: Synthetic oligonucleotide
  source 1..19: mol_type = other RNA
ggaagttgtgaaacctgtc

SEQ ID NO: 3787 - RNA, 19 nt, synthetic construct
  misc_feature 1..19: note = Description of Artificial Sequence: Synthetic oligonucleotide
  source 1..19: mol_type = other RNA
gggaagttgtgaaacctgt

SEQ ID NO: 3788 - RNA, 19 nt, synthetic construct
  misc_feature 1..19: note = Description of Artificial Sequence: Synthetic oligonucleotide
  source 1..19: mol_type = other RNA
cgggaagttgtgaaacctg

SEQ ID NO: 3789 - RNA, 19 nt, synthetic construct
  misc_feature 1..19: note = Description of Artificial Sequence: Synthetic oligonucleotide
  source 1..19: mol_type = other RNA
ccgggaagttgtgaaacct

SEQ ID NO: 3790 - RNA, 19 nt, synthetic construct
  misc_feature 1..19: note = Description of Artificial Sequence: Synthetic oligonucleotide
  source 1..19: mol_type = other RNA
tccgggaagttgtgaaacc

SEQ ID NO: 3791 - RNA, 19 nt, synthetic construct
  misc_feature 1..19: note = Description of Artificial Sequence: Synthetic oligonucleotide
  source 1..19: mol_type = other RNA
atccgggaagttgtgaaac

SEQ ID NO: 3792 - RNA, 19 nt, synthetic construct
  misc_feature 1..19: note = Description of Artificial Sequence: Synthetic oligonucleotide
  source 1..19: mol_type = other RNA
catccgggaagttgtgaaa

SEQ ID NO: 3793 - RNA, 19 nt, synthetic construct
  misc_feature 1..19: note = Description of Artificial Sequence: Synthetic oligonucleotide
  source 1..19: mol_type = other RNA
ccatccgggaagttgtgaa

SEQ ID NO: 3794 - RNA, 19 nt, synthetic construct
  misc_feature 1..19: note = Description of Artificial Sequence: Synthetic oligonucleotide
  source 1..19: mol_type = other RNA
cccatccgggaagttgtga

SEQ ID NO: 3795 - RNA, 19 nt, synthetic construct
  misc_feature 1..19: note = Description of Artificial Sequence: Synthetic oligonucleotide
  source 1..19: mol_type = other RNA
ccccatccgggaagttgtg

SEQ ID NO: 3796 - RNA, 19 nt, synthetic construct
  misc_feature 1..19: note = Description of Artificial Sequence: Synthetic oligonucleotide
  source 1..19: mol_type = other RNA
gccccatccgggaagttgt

SEQ ID NO: 3797 - RNA, 19 nt, synthetic construct
  misc_feature 1..19: note = Description of Artificial Sequence: Synthetic oligonucleotide
  source 1..19: mol_type = other RNA
agccccatccgggaagttg

SEQ ID NO: 3798 - RNA, 19 nt, synthetic construct
  misc_feature 1..19: note = Description of Artificial Sequence: Synthetic oligonucleotide
  source 1..19: mol_type = other RNA
cagccccatccgggaagtt

SEQ ID NO: 3799 - RNA, 19 nt, synthetic construct
  misc_feature 1..19: note = Description of Artificial Sequence: Synthetic oligonucleotide
  source 1..19: mol_type = other RNA
acagccccatccgggaagt

SEQ ID NO: 3800 - RNA, 19 nt, synthetic construct
  misc_feature 1..19: note = Description of Artificial Sequence: Synthetic oligonucleotide
  source 1..19: mol_type = other RNA
cacagccccatccgggaag

SEQ ID NO: 3801 - RNA, 19 nt, synthetic construct
  misc_feature 1..19: note = Description of Artificial Sequence: Synthetic oligonucleotide
  source 1..19: mol_type = other RNA
ccacagccccatccgggaa

SEQ ID NO: 3802 - RNA, 19 nt, synthetic construct
  misc_feature 1..19: note = Description of Artificial Sequence: Synthetic oligonucleotide
  source 1..19: mol_type = other RNA
accacagccccatccggga

SEQ ID NO: 3803 - RNA, 19 nt, synthetic construct
  misc_feature 1..19: note = Description of Artificial Sequence: Synthetic oligonucleotide
  source 1..19: mol_type = other RNA
caccacagccccatccggg

SEQ ID NO: 3804 - RNA, 19 nt, synthetic construct
  misc_feature 1..19: note = Description of Artificial Sequence: Synthetic oligonucleotide
  source 1..19: mol_type = other RNA
ccaccacagccccatccgg

SEQ ID NO: 3805 - RNA, 19 nt, synthetic construct
  misc_feature 1..19: note = Description of Artificial Sequence: Synthetic oligonucleotide
  source 1..19: mol_type = other RNA
cccaccacagccccatccg

SEQ ID NO: 3806 - RNA, 19 nt, synthetic construct
  misc_feature 1..19: note = Description of Artificial Sequence: Synthetic oligonucleotide
  source 1..19: mol_type = other RNA
acccaccacagccccatcc

SEQ ID NO: 3807 - RNA, 19 nt, synthetic construct
  misc_feature 1..19: note = Description of Artificial Sequence: Synthetic oligonucleotide
  source 1..19: mol_type = other RNA
gacccaccacagccccatc

SEQ ID NO: 3808 - RNA, 19 nt, synthetic construct
  misc_feature 1..19: note = Description of Artificial Sequence: Synthetic oligonucleotide
  source 1..19: mol_type = other RNA
tgacccaccacagccccat

SEQ ID NO: 3809 - RNA, 19 nt, synthetic construct
  misc_feature 1..19: note = Description of Artificial Sequence: Synthetic oligonucleotide
  source 1..19: mol_type = other RNA
gtgacccaccacagcccca

SEQ ID NO: 3810 - RNA, 19 nt, synthetic construct
  misc_feature 1..19: note = Description of Artificial Sequence: Synthetic oligonucleotide
  source 1..19: mol_type = other RNA
tgtgacccaccacagcccc

SEQ ID NO: 3811 - RNA, 19 nt, synthetic construct
  misc_feature 1..19: note = Description of Artificial Sequence: Synthetic oligonucleotide
  source 1..19: mol_type = other RNA
ctgtgacccaccacagccc

SEQ ID NO: 3812 - RNA, 19 nt, synthetic construct
  misc_feature 1..19: note = Description of Artificial Sequence: Synthetic oligonucleotide
  source 1..19: mol_type = other RNA
actgtgacccaccacagcc

SEQ ID NO: 3813 - RNA, 19 nt, synthetic construct
  misc_feature 1..19: note = Description of Artificial Sequence: Synthetic oligonucleotide
  source 1..19: mol_type = other RNA
cactgtgacccaccacagc

SEQ ID NO: 3814 - RNA, 19 nt, synthetic construct
  misc_feature 1..19: note = Description of Artificial Sequence: Synthetic oligonucleotide
  source 1..19: mol_type = other RNA
gcactgtgacccaccacag

SEQ ID NO: 3815 - RNA, 19 nt, synthetic construct
  misc_feature 1..19: note = Description of Artificial Sequence: Synthetic oligonucleotide
  source 1..19: mol_type = other RNA
tgcactgtgacccaccaca

SEQ ID NO: 3816 - RNA, 19 nt, synthetic construct
  misc_feature 1..19: note = Description of Artificial Sequence: Synthetic oligonucleotide
  source 1..19: mol_type = other RNA
ctgcactgtgacccaccac

SEQ ID NO: 3817 - RNA, 19 nt, synthetic construct
  misc_feature 1..19: note = Description of Artificial Sequence: Synthetic oligonucleotide
  source 1..19: mol_type = other RNA
gctgcactgtgacccacca

SEQ ID NO: 3818 - RNA, 19 nt, synthetic construct
  misc_feature 1..19: note = Description of Artificial Sequence: Synthetic oligonucleotide
  source 1..19: mol_type = other RNA
ggctgcactgtgacccacc

SEQ ID NO: 3819 - RNA, 19 nt, synthetic construct
  misc_feature 1..19: note = Description of Artificial Sequence: Synthetic oligonucleotide
  source 1..19: mol_type = other RNA
aggctgcactgtgacccac

SEQ ID NO: 3820 - RNA, 19 nt, synthetic construct
  misc_feature 1..19: note = Description of Artificial Sequence: Synthetic oligonucleotide
  source 1..19: mol_type = other RNA
gaggctgcactgtgaccca

SEQ ID NO: 3821 - RNA, 19 nt, synthetic construct
  misc_feature 1..19: note = Description of Artificial Sequence: Synthetic oligonucleotide
  source 1..19: mol_type = other RNA
ggaggctgcactgtgaccc

SEQ ID NO: 3822 - RNA, 19 nt, synthetic construct
  misc_feature 1..19: note = Description of Artificial Sequence: Synthetic oligonucleotide
  source 1..19: mol_type = other RNA
tggaggctgcactgtgacc

SEQ ID NO: 3823 - RNA, 19 nt, synthetic construct
  misc_feature 1..19: note = Description of Artificial Sequence: Synthetic oligonucleotide
  source 1..19: mol_type = other RNA
ctggaggctgcactgtgac

SEQ ID NO: 3824 - RNA, 19 nt, synthetic construct
  misc_feature 1..19: note = Description of Artificial Sequence: Synthetic oligonucleotide
  source 1..19: mol_type = other RNA
gctggaggctgcactgtga

SEQ ID NO: 3825 - RNA, 19 nt, synthetic construct
  misc_feature 1..19: note = Description of Artificial Sequence: Synthetic oligonucleotide
  source 1..19: mol_type = other RNA
ggctggaggctgcactgtg

SEQ ID NO: 3826 - RNA, 19 nt, synthetic construct
  misc_feature 1..19: note = Description of Artificial Sequence: Synthetic oligonucleotide
  source 1..19: mol_type = other RNA
tggctggaggctgcactgt

SEQ ID NO: 3827 - RNA, 19 nt, synthetic construct
  misc_feature 1..19: note = Description of Artificial Sequence: Synthetic oligonucleotide
  source 1..19: mol_type = other RNA
ctggctggaggctgcactg

SEQ ID NO: 3828 - RNA, 19 nt, synthetic construct
  misc_feature 1..19: note = Description of Artificial Sequence: Synthetic oligonucleotide
  source 1..19: mol_type = other RNA
tctggctggaggctgcact

SEQ ID NO: 3829 - RNA, 19 nt, synthetic construct
  misc_feature 1..19: note = Description of Artificial Sequence: Synthetic oligonucleotide
  source 1..19: mol_type = other RNA
ttctggctggaggctgcac

SEQ ID NO: 3830 - RNA, 19 nt, synthetic construct
  misc_feature 1..19: note = Description of Artificial Sequence: Synthetic oligonucleotide
  source 1..19: mol_type = other RNA
cttctggctggaggctgca

SEQ ID NO: 3831 - RNA, 19 nt, synthetic construct
  misc_feature 1..19: note = Description of Artificial Sequence: Synthetic oligonucleotide
  source 1..19: mol_type = other RNA
ccttctggctggaggctgc

SEQ ID NO: 3832 - RNA, 19 nt, synthetic construct
  misc_feature 1..19: note = Description of Artificial Sequence: Synthetic oligonucleotide
  source 1..19: mol_type = other RNA
tccttctggctggaggctg

SEQ ID NO: 3833 - RNA, 19 nt, synthetic construct
  misc_feature 1..19: note = Description of Artificial Sequence: Synthetic oligonucleotide
  source 1..19: mol_type = other RNA
atccttctggctggaggct

SEQ ID NO: 3834 - RNA, 19 nt, synthetic construct
  misc_feature 1..19: note = Description of Artificial Sequence: Synthetic oligonucleotide
  source 1..19: mol_type = other RNA
catccttctggctggaggc

SEQ ID NO: 3835 - RNA, 19 nt, synthetic construct
  misc_feature 1..19: note = Description of Artificial Sequence: Synthetic oligonucleotide
  source 1..19: mol_type = other RNA
ccatccttctggctggagg

SEQ ID NO: 3836 - RNA, 19 nt, synthetic construct
  misc_feature 1..19: note = Description of Artificial Sequence: Synthetic oligonucleotide
  source 1..19: mol_type = other RNA
cccatccttctggctggag

SEQ ID NO: 3837 - RNA, 19 nt, synthetic construct
  misc_feature 1..19: note = Description of Artificial Sequence: Synthetic oligonucleotide
  source 1..19: mol_type = other RNA
ccccatccttctggctgga

SEQ ID NO: 3838 - RNA, 19 nt, synthetic construct
  misc_feature 1..19: note = Description of Artificial Sequence: Synthetic oligonucleotide
  source 1..19: mol_type = other RNA
accccatccttctggctgg

SEQ ID NO: 3839 - RNA, 19 nt, synthetic construct
  misc_feature 1..19: note = Description of Artificial Sequence: Synthetic oligonucleotide
  source 1..19: mol_type = other RNA
caccccatccttctggctg

SEQ ID NO: 3840 - RNA, 19 nt, synthetic construct
  misc_feature 1..19: note = Description of Artificial Sequence: Synthetic oligonucleotide
  source 1..19: mol_type = other RNA
ccaccccatccttctggct

SEQ ID NO: 3841 - RNA, 19 nt, synthetic construct
  misc_feature 1..19: note = Description of Artificial Sequence: Synthetic oligonucleotide
  source 1..19: mol_type = other RNA
gccaccccatccttctggc

SEQ ID NO: 3842 - RNA, 19 nt, synthetic construct
  misc_feature 1..19: note = Description of Artificial Sequence: Synthetic oligonucleotide
  source 1..19: mol_type = other RNA
agccaccccatccttctgg

SEQ ID NO: 3843 - RNA, 19 nt, synthetic construct
  misc_feature 1..19: note = Description of Artificial Sequence: Synthetic oligonucleotide
  source 1..19: mol_type = other RNA
gagccaccccatccttctg

SEQ ID NO: 3844 - RNA, 19 nt, synthetic construct
  misc_feature 1..19: note = Description of Artificial Sequence: Synthetic oligonucleotide
  source 1..19: mol_type = other RNA
ggagccaccccatccttct

SEQ ID NO: 3845 - RNA, 19 nt, synthetic construct
  misc_feature 1..19: note = Description of Artificial Sequence: Synthetic oligonucleotide
  source 1..19: mol_type = other RNA
gggagccaccccatccttc

SEQ ID NO: 3846 - RNA, 19 nt, synthetic construct
  misc_feature 1..19: note = Description of Artificial Sequence: Synthetic oligonucleotide
  source 1..19: mol_type = other RNA
tgggagccaccccatcctt

SEQ ID NO: 3847 - RNA, 19 nt, synthetic construct
  misc_feature 1..19: note = Description of Artificial Sequence: Synthetic oligonucleotide
  source 1..19: mol_type = other RNA
gtgggagccaccccatcct

SEQ ID NO: 3848 - RNA, 19 nt, synthetic construct
  misc_feature 1..19: note = Description of Artificial Sequence: Synthetic oligonucleotide
  source 1..19: mol_type = other RNA
agtgggagccaccccatcc

SEQ ID NO: 3849 - RNA, 19 nt, synthetic construct
  misc_feature 1..19: note = Description of Artificial Sequence: Synthetic oligonucleotide
  source 1..19: mol_type = other RNA
gagtgggagccaccccatc

SEQ ID NO: 3850 - RNA, 19 nt, synthetic construct
  misc_feature 1..19: note = Description of Artificial Sequence: Synthetic oligonucleotide
  source 1..19: mol_type = other RNA
ggagtgggagccaccccat

SEQ ID NO: 3851 - RNA, 19 nt, synthetic construct
  misc_feature 1..19: note = Description of Artificial Sequence: Synthetic oligonucleotide
  source 1..19: mol_type = other RNA
aggagtgggagccacccca

SEQ ID NO: 3852 - RNA, 19 nt, synthetic construct
  misc_feature 1..19: note = Description of Artificial Sequence: Synthetic oligonucleotide
  source 1..19: mol_type = other RNA
caggagtgggagccacccc

SEQ ID NO: 3853 - RNA, 19 nt, synthetic construct
  misc_feature 1..19: note = Description of Artificial Sequence: Synthetic oligonucleotide
  source 1..19: mol_type = other RNA
gcaggagtgggagccaccc

SEQ ID NO: 3854 - RNA, 19 nt, synthetic construct
  misc_feature 1..19: note = Description of Artificial Sequence: Synthetic oligonucleotide
  source 1..19: mol_type = other RNA
agcaggagtgggagccacc

SEQ ID NO: 3855 - RNA, 19 nt, synthetic construct
  misc_feature 1..19: note = Description of Artificial Sequence: Synthetic oligonucleotide
  source 1..19: mol_type = other RNA
cagcaggagtgggagccac

SEQ ID NO: 3856 - RNA, 19 nt, synthetic construct
  misc_feature 1..19: note = Description of Artificial Sequence: Synthetic oligonucleotide
  source 1..19: mol_type = other RNA
gcagcaggagtgggagcca

SEQ ID NO: 3857 - RNA, 19 nt, synthetic construct
  misc_feature 1..19: note = Description of Artificial Sequence: Synthetic oligonucleotide
  source 1..19: mol_type = other RNA
agcagcaggagtgggagcc

SEQ ID NO: 3858 - RNA, 19 nt, synthetic construct
  misc_feature 1..19: note = Description of Artificial Sequence: Synthetic oligonucleotide
  source 1..19: mol_type = other RNA
aagcagcaggagtgggagc

SEQ ID NO: 3859 - RNA, 19 nt, synthetic construct
  misc_feature 1..19: note = Description of Artificial Sequence: Synthetic oligonucleotide
  source 1..19: mol_type = other RNA
gaagcagcaggagtgggag

SEQ ID NO: 3860 - RNA, 19 nt, synthetic construct
  misc_feature 1..19: note = Description of Artificial Sequence: Synthetic oligonucleotide
  source 1..19: mol_type = other RNA
agaagcagcaggagtggga

SEQ ID NO: 3861 - RNA, 19 nt, synthetic construct
  misc_feature 1..19: note = Description of Artificial Sequence: Synthetic oligonucleotide
  source 1..19: mol_type = other RNA
cagaagcagcaggagtggg

SEQ ID NO: 3862 - RNA, 19 nt, synthetic construct
  misc_feature 1..19: note = Description of Artificial Sequence: Synthetic oligonucleotide
  source 1..19: mol_type = other RNA
tcagaagcagcaggagtgg

SEQ ID NO: 3863 - RNA, 19 nt, synthetic construct
  misc_feature 1..19: note = Description of Artificial Sequence: Synthetic oligonucleotide
  source 1..19: mol_type = other RNA
gtcagaagcagcaggagtg

SEQ ID NO: 3864 - RNA, 19 nt, synthetic construct
  misc_feature 1..19: note = Description of Artificial Sequence: Synthetic oligonucleotide
  source 1..19: mol_type = other RNA
agtcagaagcagcaggagt

SEQ ID NO: 3865 - RNA, 19 nt, synthetic construct
  misc_feature 1..19: note = Description of Artificial Sequence: Synthetic oligonucleotide
  source 1..19: mol_type = other RNA
gagtcagaagcagcaggag

SEQ ID NO: 3866 - RNA, 19 nt, synthetic construct
  misc_feature 1..19: note = Description of Artificial Sequence: Synthetic oligonucleotide
  source 1..19: mol_type = other RNA
tgagtcagaagcagcagga

SEQ ID NO: 3867 - RNA, 19 nt, synthetic construct
  misc_feature 1..19: note = Description of Artificial Sequence: Synthetic oligonucleotide
  source 1..19: mol_type = other RNA
ttgagtcagaagcagcagg

SEQ ID NO: 3868 - RNA, 19 nt, synthetic construct
  misc_feature 1..19: note = Description of Artificial Sequence: Synthetic oligonucleotide
  source 1..19: mol_type = other RNA
attgagtcagaagcagcag

SEQ ID NO: 3869 - RNA, 19 nt, synthetic construct
  misc_feature 1..19: note = Description of Artificial Sequence: Synthetic oligonucleotide
  source 1..19: mol_type = other RNA
cattgagtcagaagcagca

SEQ ID NO: 3870 - RNA, 19 nt, synthetic construct
  misc_feature 1..19: note = Description of Artificial Sequence: Synthetic oligonucleotide
  source 1..19: mol_type = other RNA
gcattgagtcagaagcagc

SEQ ID NO: 3871 - RNA, 19 nt, synthetic construct
  misc_feature 1..19: note = Description of Artificial Sequence: Synthetic oligonucleotide
  source 1..19: mol_type = other RNA
agcattgagtcagaagcag

SEQ ID NO: 3872 - RNA, 19 nt, synthetic construct
  misc_feature 1..19: note = Description of Artificial Sequence: Synthetic oligonucleotide
  source 1..19: mol_type = other RNA
aagcattgagtcagaagca

SEQ ID NO: 3873 - RNA, 19 nt, synthetic construct
  misc_feature 1..19: note = Description of Artificial Sequence: Synthetic oligonucleotide
  source 1..19: mol_type = other RNA
taagcattgagtcagaagc

SEQ ID NO: 3874 - RNA, 19 nt, synthetic construct
  misc_feature 1..19: note = Description of Artificial Sequence: Synthetic oligonucleotide
  source 1..19: mol_type = other RNA
ctaagcattgagtcagaag

SEQ ID NO: 3875 - RNA, 19 nt, synthetic construct
  misc_feature 1..19: note = Description of Artificial Sequence: Synthetic oligonucleotide
  source 1..19: mol_type = other RNA
cctaagcattgagtcagaa

SEQ ID NO: 3876 - RNA, 19 nt, synthetic construct
  misc_feature 1..19: note = Description of Artificial Sequence: Synthetic oligonucleotide
  source 1..19: mol_type = other RNA
ccctaagcattgagtcaga

SEQ ID NO: 3877 - RNA, 19 nt, synthetic construct
  misc_feature 1..19: note = Description of Artificial Sequence: Synthetic oligonucleotide
  source 1..19: mol_type = other RNA
cccctaagcattgagtcag

SEQ ID NO: 3878 - RNA, 19 nt, synthetic construct
  misc_feature 1..19: note = Description of Artificial Sequence: Synthetic oligonucleotide
  source 1..19: mol_type = other RNA
acccctaagcattgagtca

SEQ ID NO: 3879 - RNA, 19 nt, synthetic construct
  misc_feature 1..19: note = Description of Artificial Sequence: Synthetic oligonucleotide
  source 1..19: mol_type = other RNA
gacccctaagcattgagtc

SEQ ID NO: 3880 - RNA, 19 nt, synthetic construct
  misc_feature 1..19: note = Description of Artificial Sequence: Synthetic oligonucleotide
  source 1..19: mol_type = other RNA
ggacccctaagcattgagt

SEQ ID NO: 3881 - RNA, 19 nt, synthetic construct
  misc_feature 1..19: note = Description of Artificial Sequence: Synthetic oligonucleotide
  source 1..19: mol_type = other RNA
gggacccctaagcattgag

SEQ ID NO: 3882 - RNA, 19 nt, synthetic construct
  misc_feature 1..19: note = Description of Artificial Sequence: Synthetic oligonucleotide
  source 1..19: mol_type = other RNA
agggacccctaagcattga

SEQ ID NO: 3883 - RNA, 19 nt, synthetic construct
  misc_feature 1..19: note = Description of Artificial Sequence: Synthetic oligonucleotide
  source 1..19: mol_type = other RNA
cagggacccctaagcattg

SEQ ID NO: 3884 - RNA, 19 nt, synthetic construct
  misc_feature 1..19: note = Description of Artificial Sequence: Synthetic oligonucleotide
  source 1..19: mol_type = other RNA
ccagggacccctaagcatt

SEQ ID NO: 3885 - RNA, 19 nt, synthetic construct
  misc_feature 1..19: note = Description of Artificial Sequence: Synthetic oligonucleotide
  source 1..19: mol_type = other RNA
cccagggacccctaagcat

SEQ ID NO: 3886 - RNA, 19 nt, synthetic construct
  misc_feature 1..19: note = Description of Artificial Sequence: Synthetic oligonucleotide
  source 1..19: mol_type = other RNA
gcccagggacccctaagca

SEQ ID NO: 3887 - RNA, 19 nt, synthetic construct
  misc_feature 1..19: note = Description of Artificial Sequence: Synthetic oligonucleotide
  source 1..19: mol_type = other RNA
tgcccagggacccctaagc

SEQ ID NO: 3888 - RNA, 19 nt, synthetic construct
  misc_feature 1..19: note = Description of Artificial Sequence: Synthetic oligonucleotide
  source 1..19: mol_type = other RNA
ctgcccagggacccctaag

SEQ ID NO: 3889 - RNA, 19 nt, synthetic construct
  misc_feature 1..19: note = Description of Artificial Sequence: Synthetic oligonucleotide
  source 1..19: mol_type = other RNA
gctgcccagggacccctaa

SEQ ID NO: 3890 - RNA, 19 nt, synthetic construct
  misc_feature 1..19: note = Description of Artificial Sequence: Synthetic oligonucleotide
  source 1..19: mol_type = other RNA
cgctgcccagggaccccta

SEQ ID NO: 3891 - RNA, 19 nt, synthetic construct
  misc_feature 1..19: note = Description of Artificial Sequence: Synthetic oligonucleotide
  source 1..19: mol_type = other RNA
gcgctgcccagggacccct

SEQ ID NO: 3892 - RNA, 19 nt, synthetic construct
  misc_feature 1..19: note = Description of Artificial Sequence: Synthetic oligonucleotide
  source 1..19: mol_type = other RNA
agcgctgcccagggacccc

SEQ ID NO: 3893 - RNA, 19 nt, synthetic construct
  misc_feature 1..19: note = Description of Artificial Sequence: Synthetic oligonucleotide
  source 1..19: mol_type = other RNA
gagcgctgcccagggaccc

SEQ ID NO: 3894 - RNA, 19 nt, synthetic construct
  misc_feature 1..19: note = Description of Artificial Sequence: Synthetic oligonucleotide
  source 1..19: mol_type = other RNA
cgagcgctgcccagggacc

SEQ ID NO: 3895 - RNA, 19 nt, synthetic construct
  misc_feature 1..19: note = Description of Artificial Sequence: Synthetic oligonucleotide
  source 1..19: mol_type = other RNA
gcgagcgctgcccagggac

SEQ ID NO: 3896 - RNA, 19 nt, synthetic construct
  misc_feature 1..19: note = Description of Artificial Sequence: Synthetic oligonucleotide
  source 1..19: mol_type = other RNA
ggcgagcgctgcccaggga

SEQ ID NO: 3897 - RNA, 19 nt, synthetic construct
  misc_feature 1..19: note = Description of Artificial Sequence: Synthetic oligonucleotide
  source 1..19: mol_type = other RNA
tggcgagcgctgcccaggg

SEQ ID NO: 3898 - RNA, 19 nt, synthetic construct
  misc_feature 1..19: note = Description of Artificial Sequence: Synthetic oligonucleotide
  source 1..19: mol_type = other RNA
atggcgagcgctgcccagg

SEQ ID NO: 3899 - RNA, 19 nt, synthetic construct
  misc_feature 1..19: note = Description of Artificial Sequence: Synthetic oligonucleotide
  source 1..19: mol_type = other RNA
aatggcgagcgctgcccag

SEQ ID NO: 3900 - RNA, 19 nt, synthetic construct
  misc_feature 1..19: note = Description of Artificial Sequence: Synthetic oligonucleotide
  source 1..19: mol_type = other RNA
caatggcgagcgctgccca

SEQ ID NO: 3901 - RNA, 19 nt, synthetic construct
  misc_feature 1..19: note = Description of Artificial Sequence: Synthetic oligonucleotide
  source 1..19: mol_type = other RNA
tcaatggcgagcgctgccc

SEQ ID NO: 3902 - RNA, 19 nt, synthetic construct
  misc_feature 1..19: note = Description of Artificial Sequence: Synthetic oligonucleotide
  source 1..19: mol_type = other RNA
ttcaatggcgagcgctgcc

SEQ ID NO: 3903 - RNA, 19 nt, synthetic construct
  misc_feature 1..19: note = Description of Artificial Sequence: Synthetic oligonucleotide
  source 1..19: mol_type = other RNA
attcaatggcgagcgctgc

SEQ ID NO: 3904 - RNA, 19 nt, synthetic construct
  misc_feature 1..19: note = Description of Artificial Sequence: Synthetic oligonucleotide
  source 1..19: mol_type = other RNA
cattcaatggcgagcgctg

SEQ ID NO: 3905 - RNA, 19 nt, synthetic construct
  misc_feature 1..19: note = Description of Artificial Sequence: Synthetic oligonucleotide
  source 1..19: mol_type = other RNA
tcattcaatggcgagcgct

SEQ ID NO: 3906 - RNA, 19 nt, synthetic construct
  misc_feature 1..19: note = Description of Artificial Sequence: Synthetic oligonucleotide
  source 1..19: mol_type = other RNA
gtcattcaatggcgagcgc

SEQ ID NO: 3907 - RNA, 19 nt, synthetic construct
  misc_feature 1..19: note = Description of Artificial Sequence: Synthetic oligonucleotide
  source 1..19: mol_type = other RNA
agtcattcaatggcgagcg

SEQ ID NO: 3908 - RNA, 19 nt, synthetic construct
  misc_feature 1..19: note = Description of Artificial Sequence: Synthetic oligonucleotide
  source 1..19: mol_type = other RNA
aagtcattcaatggcgagc

SEQ ID NO: 3909 - RNA, 19 nt, synthetic construct
  misc_feature 1..19: note = Description of Artificial Sequence: Synthetic oligonucleotide
  source 1..19: mol_type = other RNA
gaagtcattcaatggcgag

SEQ ID NO: 3910 - RNA, 19 nt, synthetic construct
  misc_feature 1..19: note = Description of Artificial Sequence: Synthetic oligonucleotide
  source 1..19: mol_type = other RNA
ggaagtcattcaatggcga

SEQ ID NO: 3911 - RNA, 19 nt, synthetic construct
  misc_feature 1..19: note = Description of Artificial Sequence: Synthetic oligonucleotide
  source 1..19: mol_type = other RNA
tggaagtcattcaatggcg

SEQ ID NO: 3912 - RNA, 19 nt, synthetic construct
  misc_feature 1..19: note = Description of Artificial Sequence: Synthetic oligonucleotide
  source 1..19: mol_type = other RNA
ttggaagtcattcaatggc

SEQ ID NO: 3913 - RNA, 19 nt, synthetic construct
  misc_feature 1..19: note = Description of Artificial Sequence: Synthetic oligonucleotide
  source 1..19: mol_type = other RNA
cttggaagtcattcaatgg

SEQ ID NO: 3914 - RNA, 19 nt, synthetic construct
  misc_feature 1..19: note = Description of Artificial Sequence: Synthetic oligonucleotide
  source 1..19: mol_type = other RNA
acttggaagtcattcaatg

SEQ ID NO: 3915 - RNA, 19 nt, synthetic construct
  misc_feature 1..19: note = Description of Artificial Sequence: Synthetic oligonucleotide
  source 1..19: mol_type = other RNA
cacttggaagtcattcaat

SEQ ID NO: 3916 - RNA, 19 nt, synthetic construct
  misc_feature 1..19: note = Description of Artificial Sequence: Synthetic oligonucleotide
  source 1..19: mol_type = other RNA
gcacttggaagtcattcaa

SEQ ID NO: 3917 - RNA, 19 nt, synthetic construct
  misc_feature 1..19: note = Description of Artificial Sequence: Synthetic oligonucleotide
  source 1..19: mol_type = other RNA
agcacttggaagtcattca

SEQ ID NO: 3918 - RNA, 19 nt, synthetic construct
  misc_feature 1..19: note = Description of Artificial Sequence: Synthetic oligonucleotide
  source 1..19: mol_type = other RNA
gagcacttggaagtcattc

SEQ ID NO: 3919 - RNA, 19 nt, synthetic construct
  misc_feature 1..19: note = Description of Artificial Sequence: Synthetic oligonucleotide
  source 1..19: mol_type = other RNA
ggagcacttggaagtcatt

SEQ ID NO: 3920 - RNA, 19 nt, synthetic construct
  misc_feature 1..19: note = Description of Artificial Sequence: Synthetic oligonucleotide
  source 1..19: mol_type = other RNA
cggagcacttggaagtcat

SEQ ID NO: 3921 - RNA, 19 nt, synthetic construct
  misc_feature 1..19: note = Description of Artificial Sequence: Synthetic oligonucleotide
  source 1..19: mol_type = other RNA
ccggagcacttggaagtca

SEQ ID NO: 3922 - RNA, 19 nt, synthetic construct
  misc_feature 1..19: note = Description of Artificial Sequence: Synthetic oligonucleotide
  source 1..19: mol_type = other RNA
cccggagcacttggaagtc

SEQ ID NO: 3923 - RNA, 19 nt, synthetic construct
  misc_feature 1..19: note = Description of Artificial Sequence: Synthetic oligonucleotide
  source 1..19: mol_type = other RNA
ccccggagcacttggaagt

SEQ ID NO: 3924 - RNA, 19 nt, synthetic construct
  misc_feature 1..19: note = Description of Artificial Sequence: Synthetic oligonucleotide
  source 1..19: mol_type = other RNA
gccccggagcacttggaag

SEQ ID NO: 3925 - RNA, 19 nt, synthetic construct
  misc_feature 1..19: note = Description of Artificial Sequence: Synthetic oligonucleotide
  source 1..19: mol_type = other RNA
tgccccggagcacttggaa

SEQ ID NO: 3926 - RNA, 19 nt, synthetic construct
  misc_feature 1..19: note = Description of Artificial Sequence: Synthetic oligonucleotide
  source 1..19: mol_type = other RNA
gtgccccggagcacttgga

SEQ ID NO: 3927 - RNA, 19 nt, synthetic construct
  misc_feature 1..19: note = Description of Artificial Sequence: Synthetic oligonucleotide
  source 1..19: mol_type = other RNA
tgtgccccggagcacttgg

SEQ ID NO: 3928 - RNA, 19 nt, synthetic construct
  misc_feature 1..19: note = Description of Artificial Sequence: Synthetic oligonucleotide
  source 1..19: mol_type = other RNA
ctgtgccccggagcacttg

SEQ ID NO: 3929 - RNA, 19 nt, synthetic construct
  misc_feature 1..19: note = Description of Artificial Sequence: Synthetic oligonucleotide
  source 1..19: mol_type = other RNA
tctgtgccccggagcactt

SEQ ID NO: 3930 - RNA, 19 nt, synthetic construct
  misc_feature 1..19: note = Description of Artificial Sequence: Synthetic oligonucleotide
  source 1..19: mol_type = other RNA
ctctgtgccccggagcact

SEQ ID NO: 3931 - RNA, 19 nt, synthetic construct
  misc_feature 1..19: note = Description of Artificial Sequence: Synthetic oligonucleotide
  source 1..19: mol_type = other RNA
gctctgtgccccggagcac

SEQ ID NO: 3932 - RNA, 19 nt, synthetic construct
  misc_feature 1..19: note = Description of Artificial Sequence: Synthetic oligonucleotide
  source 1..19: mol_type = other RNA
agctctgtgccccggagca

SEQ ID NO: 3933 - RNA, 19 nt, synthetic construct
  misc_feature 1..19: note = Description of Artificial Sequence: Synthetic oligonucleotide
  source 1..19: mol_type = other RNA
tagctctgtgccccggagc

SEQ ID NO: 3934 - RNA, 19 nt, synthetic construct
  misc_feature 1..19: note = Description of Artificial Sequence: Synthetic oligonucleotide
  source 1..19: mol_type = other RNA
gtagctctgtgccccggag

SEQ ID NO: 3935 - RNA, 19 nt, synthetic construct
  misc_feature 1..19: note = Description of Artificial Sequence: Synthetic oligonucleotide
  source 1..19: mol_type = other RNA
tgtagctctgtgccccgga

SEQ ID NO: 3936 - RNA, 19 nt, synthetic construct
  misc_feature 1..19: note = Description of Artificial Sequence: Synthetic oligonucleotide
  source 1..19: mol_type = other RNA
ctgtagctctgtgccccgg

SEQ ID NO: 3937 - RNA, 19 nt, synthetic construct
  misc_feature 1..19: note = Description of Artificial Sequence: Synthetic oligonucleotide
  source 1..19: mol_type = other RNA
gctgtagctctgtgccccg

SEQ ID NO: 3938 - RNA, 19 nt, synthetic construct
  misc_feature 1..19: note = Description of Artificial Sequence: Synthetic oligonucleotide
  source 1..19: mol_type = other RNA
tgctgtagctctgtgcccc

SEQ ID NO: 3939 - RNA, 19 nt, synthetic construct
  misc_feature 1..19: note = Description of Artificial Sequence: Synthetic oligonucleotide
  source 1..19: mol_type = other RNA
gtgctgtagctctgtgccc

SEQ ID NO: 3940 - RNA, 19 nt, synthetic construct
  misc_feature 1..19: note = Description of Artificial Sequence: Synthetic oligonucleotide
  source 1..19: mol_type = other RNA
ggtgctgtagctctgtgcc

SEQ ID NO: 3941 - RNA, 19 nt, synthetic construct
  misc_feature 1..19: note = Description of Artificial Sequence: Synthetic oligonucleotide
  source 1..19: mol_type = other RNA
aggtgctgtagctctgtgc

SEQ ID NO: 3942 - RNA, 19 nt, synthetic construct
  misc_feature 1..19: note = Description of Artificial Sequence: Synthetic oligonucleotide
  source 1..19: mol_type = other RNA
caggtgctgtagctctgtg

SEQ ID NO: 3943 - RNA, 19 nt, synthetic construct
  misc_feature 1..19: note = Description of Artificial Sequence: Synthetic oligonucleotide
  source 1..19: mol_type = other RNA
gcaggtgctgtagctctgt

SEQ ID NO: 3944 - RNA, 19 nt, synthetic construct
  misc_feature 1..19: note = Description of Artificial Sequence: Synthetic oligonucleotide
  source 1..19: mol_type = other RNA
agcaggtgctgtagctctg

SEQ ID NO: 3945 - RNA, 19 nt, synthetic construct
  misc_feature 1..19: note = Description of Artificial Sequence: Synthetic oligonucleotide
  source 1..19: mol_type = other RNA
tagcaggtgctgtagctct

SEQ ID NO: 3946 - RNA, 19 nt, synthetic construct
  misc_feature 1..19: note = Description of Artificial Sequence: Synthetic oligonucleotide
  source 1..19: mol_type = other RNA
gtagcaggtgctgtagctc

SEQ ID NO: 3947 - RNA, 19 nt, synthetic construct
  misc_feature 1..19: note = Description of Artificial Sequence: Synthetic oligonucleotide
  source 1..19: mol_type = other RNA
tgtagcaggtgctgtagct

SEQ ID NO: 3948 - RNA, 19 nt, synthetic construct
  misc_feature 1..19: note = Description of Artificial Sequence: Synthetic oligonucleotide
  source 1..19: mol_type = other RNA
atgtagcaggtgctgtagc

SEQ ID NO: 3949 - RNA, 19 nt, synthetic construct
  misc_feature 1..19: note = Description of Artificial Sequence: Synthetic oligonucleotide
  source 1..19: mol_type = other RNA
catgtagcaggtgctgtag

SEQ ID NO: 3950 - RNA, 19 nt, synthetic construct
  misc_feature 1..19: note = Description of Artificial Sequence: Synthetic oligonucleotide
  source 1..19: mol_type = other RNA
gcatgtagcaggtgctgta

SEQ ID NO: 3951 - RNA, 19 nt, synthetic construct
  misc_feature 1..19: note = Description of Artificial Sequence: Synthetic oligonucleotide
  source 1..19: mol_type = other RNA
cgcatgtagcaggtgctgt

SEQ ID NO: 3952 - RNA, 19 nt, synthetic construct
  misc_feature 1..19: note = Description of Artificial Sequence: Synthetic oligonucleotide
  source 1..19: mol_type = other RNA
ccgcatgtagcaggtgctg

SEQ ID NO: 3953 - RNA, 19 nt, synthetic construct
  misc_feature 1..19: note = Description of Artificial Sequence: Synthetic oligonucleotide
  source 1..19: mol_type = other RNA
accgcatgtagcaggtgct

SEQ ID NO: 3954 - RNA, 19 nt, synthetic construct
  misc_feature 1..19: note = Description of Artificial Sequence: Synthetic oligonucleotide
  source 1..19: mol_type = other RNA
caccgcatgtagcaggtgc

SEQ ID NO: 3955 - RNA, 19 nt, synthetic construct
  misc_feature 1..19: note = Description of Artificial Sequence: Synthetic oligonucleotide
  source 1..19: mol_type = other RNA
ccaccgcatgtagcaggtg

SEQ ID NO: 3956 - RNA, 19 nt, synthetic construct
  misc_feature 1..19: note = Description of Artificial Sequence: Synthetic oligonucleotide
  source 1..19: mol_type = other RNA
accaccgcatgtagcaggt

SEQ ID NO: 3957 - RNA, 19 nt, synthetic construct
  misc_feature 1..19: note = Description of Artificial Sequence: Synthetic oligonucleotide
  source 1..19: mol_type = other RNA
caccaccgcatgtagcagg

SEQ ID NO: 3958 - RNA, 19 nt, synthetic construct
  misc_feature 1..19: note = Description of Artificial Sequence: Synthetic oligonucleotide
  source 1..19: mol_type = other RNA
gcaccaccgcatgtagcag

SEQ ID NO: 3959 - RNA, 19 nt, synthetic construct
  misc_feature 1..19: note = Description of Artificial Sequence: Synthetic oligonucleotide
  source 1..19: mol_type = other RNA
ggcaccaccgcatgtagca

SEQ ID NO: 3960 - RNA, 19 nt, synthetic construct
  misc_feature 1..19: note = Description of Artificial Sequence: Synthetic oligonucleotide
  source 1..19: mol_type = other RNA
gggcaccaccgcatgtagc

SEQ ID NO: 3961 - RNA, 19 nt, synthetic construct
  misc_feature 1..19: note = Description of Artificial Sequence: Synthetic oligonucleotide
  source 1..19: mol_type = other RNA
cgggcaccaccgcatgtag

SEQ ID NO: 3962 - RNA, 19 nt, synthetic construct
  misc_feature 1..19: note = Description of Artificial Sequence: Synthetic oligonucleotide
  source 1..19: mol_type = other RNA
ccgggcaccaccgcatgta

SEQ ID NO: 3963 - RNA, 19 nt, synthetic construct
  misc_feature 1..19: note = Description of Artificial Sequence: Synthetic oligonucleotide
  source 1..19: mol_type = other RNA
cccgggcaccaccgcatgt

SEQ ID NO: 3964 - RNA, 19 nt, synthetic construct
  misc_feature 1..19: note = Description of Artificial Sequence: Synthetic oligonucleotide
  source 1..19: mol_type = other RNA
gcccgggcaccaccgcatg

SEQ ID NO: 3965 - RNA, 19 nt, synthetic construct
  misc_feature 1..19: note = Description of Artificial Sequence: Synthetic oligonucleotide
  source 1..19: mol_type = other RNA
ggcccgggcaccaccgcat

SEQ ID NO: 3966 - RNA, 19 nt, synthetic construct
  misc_feature 1..19: note = Description of Artificial Sequence: Synthetic oligonucleotide
  source 1..19: mol_type = other RNA
aggcccgggcaccaccgca

SEQ ID NO: 3967 - RNA, 19 nt, synthetic construct
  misc_feature 1..19: note = Description of Artificial Sequence: Synthetic oligonucleotide
  source 1..19: mol_type = other RNA
aaggcccgggcaccaccgc

SEQ ID NO: 3968 - RNA, 19 nt, synthetic construct
  misc_feature 1..19: note = Description of Artificial Sequence: Synthetic oligonucleotide
  source 1..19: mol_type = other RNA
caaggcccgggcaccaccg

SEQ ID NO: 3969 - RNA, 19 nt, synthetic construct
  misc_feature 1..19: note = Description of Artificial Sequence: Synthetic oligonucleotide
  source 1..19: mol_type = other RNA
ccaaggcccgggcaccacc

SEQ ID NO: 3970 - RNA, 19 nt, synthetic construct
  misc_feature 1..19: note = Description of Artificial Sequence: Synthetic oligonucleotide
  source 1..19: mol_type = other RNA
gccaaggcccgggcaccac

SEQ ID NO: 3971 - RNA, 19 nt, synthetic construct
  misc_feature 1..19: note = Description of Artificial Sequence: Synthetic oligonucleotide
  source 1..19: mol_type = other RNA
tgccaaggcccgggcacca

SEQ ID NO: 3972 - RNA, 19 nt, synthetic construct
  misc_feature 1..19: note = Description of Artificial Sequence: Synthetic oligonucleotide
  source 1..19: mol_type = other RNA
ctgccaaggcccgggcacc

SEQ ID NO: 3973 - RNA, 19 nt, synthetic construct
  misc_feature 1..19: note = Description of Artificial Sequence: Synthetic oligonucleotide
  source 1..19: mol_type = other RNA
cctgccaaggcccgggcac

SEQ ID NO: 3974 - RNA, 19 nt, synthetic construct
  misc_feature 1..19: note = Description of Artificial Sequence: Synthetic oligonucleotide
  source 1..19: mol_type = other RNA
tcctgccaaggcccgggca

SEQ ID NO: 3975 - RNA, 19 nt, synthetic construct
  misc_feature 1..19: note = Description of Artificial Sequence: Synthetic oligonucleotide
  source 1..19: mol_type = other RNA
ctcctgccaaggcccgggc

SEQ ID NO: 3976 - RNA, 19 nt, synthetic construct
  misc_feature 1..19: note = Description of Artificial Sequence: Synthetic oligonucleotide
  source 1..19: mol_type = other RNA
cctcctgccaaggcccggg

SEQ ID NO: 3977 - RNA, 19 nt, synthetic construct
  misc_feature 1..19: note = Description of Artificial Sequence: Synthetic oligonucleotide
  source 1..19: mol_type = other RNA
tcctcctgccaaggcccgg

SEQ ID NO: 3978 - RNA, 19 nt, synthetic construct
  misc_feature 1..19: note = Description of Artificial Sequence: Synthetic oligonucleotide
  source 1..19: mol_type = other RNA
atcctcctgccaaggcccg

SEQ ID NO: 3979 - RNA, 19 nt, synthetic construct
  misc_feature 1..19: note = Description of Artificial Sequence: Synthetic oligonucleotide
  source 1..19: mol_type = other RNA
catcctcctgccaaggccc

SEQ ID NO: 3980 - RNA, 19 nt, synthetic construct
  misc_feature 1..19: note = Description of Artificial Sequence: Synthetic oligonucleotide
  source 1..19: mol_type = other RNA
acatcctcctgccaaggcc

SEQ ID NO: 3981 - RNA, 19 nt, synthetic construct
  misc_feature 1..19: note = Description of Artificial Sequence: Synthetic oligonucleotide
  source 1..19: mol_type = other RNA
cacatcctcctgccaaggc

SEQ ID NO: 3982 - RNA, 19 nt, synthetic construct
  misc_feature 1..19: note = Description of Artificial Sequence: Synthetic oligonucleotide
  source 1..19: mol_type = other RNA
ccacatcctcctgccaagg

SEQ ID NO: 3983 - RNA, 19 nt, synthetic construct
  misc_feature 1..19: note = Description of Artificial Sequence: Synthetic oligonucleotide
  source 1..19: mol_type = other RNA
gccacatcctcctgccaag

SEQ ID NO: 3984 - RNA, 19 nt, synthetic construct
  misc_feature 1..19: note = Description of Artificial Sequence: Synthetic oligonucleotide
  source 1..19: mol_type = other RNA
tgccacatcctcctgccaa

SEQ ID NO: 3985 - RNA, 19 nt, synthetic construct
  misc_feature 1..19: note = Description of Artificial Sequence: Synthetic oligonucleotide
  source 1..19: mol_type = other RNA
ctgccacatcctcctgcca

SEQ ID NO: 3986 - RNA, 19 nt, synthetic construct
  misc_feature 1..19: note = Description of Artificial Sequence: Synthetic oligonucleotide
  source 1..19: mol_type = other RNA
tctgccacatcctcctgcc

SEQ ID NO: 3987 - RNA, 19 nt, synthetic construct
  misc_feature 1..19: note = Description of Artificial Sequence: Synthetic oligonucleotide
  source 1..19: mol_type = other RNA
atctgccacatcctcctgc

SEQ ID NO: 3988 - RNA, 19 nt, synthetic construct
  misc_feature 1..19: note = Description of Artificial Sequence: Synthetic oligonucleotide
  source 1..19: mol_type = other RNA
catctgccacatcctcctg

SEQ ID NO: 3989 - RNA, 19 nt, synthetic construct
  misc_feature 1..19: note = Description of Artificial Sequence: Synthetic oligonucleotide
  source 1..19: mol_type = other RNA
gcatctgccacatcctcct

SEQ ID NO: 3990 - RNA, 19 nt, synthetic construct
  misc_feature 1..19: note = Description of Artificial Sequence: Synthetic oligonucleotide
  source 1..19: mol_type = other RNA
agcatctgccacatcctcc

SEQ ID NO: 3991 - RNA, 19 nt, synthetic construct
  misc_feature 1..19: note = Description of Artificial Sequence: Synthetic oligonucleotide
  source 1..19: mol_type = other RNA
cagcatctgccacatcctc

SEQ ID NO: 3992 - RNA, 19 nt, synthetic construct
  misc_feature 1..19: note = Description of Artificial Sequence: Synthetic oligonucleotide
  source 1..19: mol_type = other RNA
tcagcatctgccacatcct

SEQ ID NO: 3993 - RNA, 19 nt, synthetic construct
  misc_feature 1..19: note = Description of Artificial Sequence: Synthetic oligonucleotide
  source 1..19: mol_type = other RNA
ttcagcatctgccacatcc

SEQ ID NO: 3994 - RNA, 19 nt, synthetic construct
  misc_feature 1..19: note = Description of Artificial Sequence: Synthetic oligonucleotide
  source 1..19: mol_type = other RNA
cttcagcatctgccacatc

SEQ ID NO: 3995 - RNA, 19 nt, synthetic construct
  misc_feature 1..19: note = Description of Artificial Sequence: Synthetic oligonucleotide
  source 1..19: mol_type = other RNA
tcttcagcatctgccacat

SEQ ID NO: 3996 - RNA, 19 nt, synthetic construct
  misc_feature 1..19: note = Description of Artificial Sequence: Synthetic oligonucleotide
  source 1..19: mol_type = other RNA
ctcttcagcatctgccaca

SEQ ID NO: 3997 - RNA, 19 nt, synthetic construct
  misc_feature 1..19: note = Description of Artificial Sequence: Synthetic oligonucleotide
  source 1..19: mol_type = other RNA
actcttcagcatctgccac

SEQ ID NO: 3998 - RNA, 19 nt, synthetic construct
  misc_feature 1..19: note = Description of Artificial Sequence: Synthetic oligonucleotide
  source 1..19: mol_type = other RNA
cactcttcagcatctgcca

SEQ ID NO: 3999 - RNA, 19 nt, synthetic construct
  misc_feature 1..19: note = Description of Artificial Sequence: Synthetic oligonucleotide
  source 1..19: mol_type = other RNA
acactcttcagcatctgcc

SEQ ID NO: 4000 - RNA, 19 nt, synthetic construct
  misc_feature 1..19: note = Description of Artificial Sequence: Synthetic oligonucleotide
  source 1..19: mol_type = other RNA
cacactcttcagcatctgc

SEQ ID NO: 4001 - RNA, 19 nt, synthetic construct
  misc_feature 1..19: note = Description of Artificial Sequence: Synthetic oligonucleotide
  source 1..19: mol_type = other RNA
gcacactcttcagcatctg

SEQ ID NO: 4002 - RNA, 19 nt, synthetic construct
  misc_feature 1..19: note = Description of Artificial Sequence: Synthetic oligonucleotide
  source 1..19: mol_type = other RNA
agcacactcttcagcatct

SEQ ID NO: 4003 - RNA, 19 nt, synthetic construct
  misc_feature 1..19: note = Description of Artificial Sequence: Synthetic oligonucleotide
  source 1..19: mol_type = other RNA
cagcacactcttcagcatc

SEQ ID NO: 4004 - RNA, 19 nt, synthetic construct
  misc_feature 1..19: note = Description of Artificial Sequence: Synthetic oligonucleotide
  source 1..19: mol_type = other RNA
ccagcacactcttcagcat

SEQ ID NO: 4005 - RNA, 19 nt, synthetic construct
  misc_feature 1..19: note = Description of Artificial Sequence: Synthetic oligonucleotide
  source 1..19: mol_type = other RNA
accagcacactcttcagca

SEQ ID NO: 4006 - RNA, 19 nt, synthetic construct
  misc_feature 1..19: note = Description of Artificial Sequence: Synthetic oligonucleotide
  source 1..19: mol_type = other RNA
gaccagcacactcttcagc

SEQ ID NO: 4007 - RNA, 19 nt, synthetic construct
  misc_feature 1..19: note = Description of Artificial Sequence: Synthetic oligonucleotide
  source 1..19: mol_type = other RNA
cgaccagcacactcttcag

SEQ ID NO: 4008 - RNA, 19 nt, synthetic construct
  misc_feature 1..19: note = Description of Artificial Sequence: Synthetic oligonucleotide
  source 1..19: mol_type = other RNA
gcgaccagcacactcttca

SEQ ID NO: 4009 - RNA, 19 nt, synthetic construct
  misc_feature 1..19: note = Description of Artificial Sequence: Synthetic oligonucleotide
  source 1..19: mol_type = other RNA
agcgaccagcacactcttc

SEQ ID NO: 4010 - RNA, 19 nt, synthetic construct
  misc_feature 1..19: note = Description of Artificial Sequence: Synthetic oligonucleotide
  source 1..19: mol_type = other RNA
cagcgaccagcacactctt

SEQ ID NO: 4011 - RNA, 19 nt, synthetic construct
  misc_feature 1..19: note = Description of Artificial Sequence: Synthetic oligonucleotide
  source 1..19: mol_type = other RNA
acagcgaccagcacactct

SEQ ID NO: 4012 - RNA, 19 nt, synthetic construct
  misc_feature 1..19: note = Description of Artificial Sequence: Synthetic oligonucleotide
  source 1..19: mol_type = other RNA
cacagcgaccagcacactc

SEQ ID NO: 4013 - RNA, 19 nt, synthetic construct
  misc_feature 1..19: note = Description of Artificial Sequence: Synthetic oligonucleotide
  source 1..19: mol_type = other RNA
ccacagcgaccagcacact

SEQ ID NO: 4014 - RNA, 19 nt, synthetic construct
  misc_feature 1..19: note = Description of Artificial Sequence: Synthetic oligonucleotide
  source 1..19: mol_type = other RNA
cccacagcgaccagcacac

SEQ ID NO: 4015 - RNA, 19 nt, synthetic construct
  misc_feature 1..19: note = Description of Artificial Sequence: Synthetic oligonucleotide
  source 1..19: mol_type = other RNA
gcccacagcgaccagcaca

SEQ ID NO: 4016 - RNA, 19 nt, synthetic construct
  misc_feature 1..19: note = Description of Artificial Sequence: Synthetic oligonucleotide
  source 1..19: mol_type = other RNA
ggcccacagcgaccagcac

SEQ ID NO: 4017 - RNA, 19 nt, synthetic construct
  misc_feature 1..19: note = Description of Artificial Sequence: Synthetic oligonucleotide
  source 1..19: mol_type = other RNA
gggcccacagcgaccagca

SEQ ID NO: 4018 - RNA, 19 nt, synthetic construct
  misc_feature 1..19: note = Description of Artificial Sequence: Synthetic oligonucleotide
  source 1..19: mol_type = other RNA
agggcccacagcgaccagc

SEQ ID NO: 4019 - RNA, 19 nt, synthetic construct
  misc_feature 1..19: note = Description of Artificial Sequence: Synthetic oligonucleotide
  source 1..19: mol_type = other RNA
aagggcccacagcgaccag

SEQ ID NO: 4020 - RNA, 19 nt, synthetic construct
  misc_feature 1..19: note = Description of Artificial Sequence: Synthetic oligonucleotide
  source 1..19: mol_type = other RNA
taagggcccacagcgacca

SEQ ID NO: 4021 - RNA, 19 nt, synthetic construct
  misc_feature 1..19: note = Description of Artificial Sequence: Synthetic oligonucleotide
  source 1..19: mol_type = other RNA
ttaagggcccacagcgacc

SEQ ID NO: 4022 - RNA, 19 nt, synthetic construct
  misc_feature 1..19: note = Description of Artificial Sequence: Synthetic oligonucleotide
  source 1..19: mol_type = other RNA
attaagggcccacagcgac

SEQ ID NO: 4023 - RNA, 19 nt, synthetic construct
  misc_feature 1..19: note = Description of Artificial Sequence: Synthetic oligonucleotide
  source 1..19: mol_type = other RNA
cattaagggcccacagcga

SEQ ID NO: 4024 - RNA, 19 nt, synthetic construct
  misc_feature 1..19: note = Description of Artificial Sequence: Synthetic oligonucleotide
  source 1..19: mol_type = other RNA
ccattaagggcccacagcg

SEQ ID NO: 4025 - RNA, 19 nt, synthetic construct
  misc_feature 1..19: note = Description of Artificial Sequence: Synthetic oligonucleotide
  source 1..19: mol_type = other RNA
tccattaagggcccacagc

SEQ ID NO: 4026 - RNA, 19 nt, synthetic construct
  misc_feature 1..19: note = Description of Artificial Sequence: Synthetic oligonucleotide
  source 1..19: mol_type = other RNA
gtccattaagggcccacag

SEQ ID NO: 4027 - RNA, 19 nt, synthetic construct
  misc_feature 1..19: note = Description of Artificial Sequence: Synthetic oligonucleotide
  source 1..19: mol_type = other RNA
agtccattaagggcccaca

SEQ ID NO: 4028 - RNA, 19 nt, synthetic construct
  misc_feature 1..19: note = Description of Artificial Sequence: Synthetic oligonucleotide
  source 1..19: mol_type = other RNA
cagtccattaagggcccac

SEQ ID NO: 4029 - RNA, 19 nt, synthetic construct
  misc_feature 1..19: note = Description of Artificial Sequence: Synthetic oligonucleotide
  source 1..19: mol_type = other RNA
gcagtccattaagggccca

SEQ ID NO: 4030 - RNA, 19 nt, synthetic construct
  misc_feature 1..19: note = Description of Artificial Sequence: Synthetic oligonucleotide
  source 1..19: mol_type = other RNA
ggcagtccattaagggccc

SEQ ID NO: 4031 - RNA, 19 nt, synthetic construct
  misc_feature 1..19: note = Description of Artificial Sequence: Synthetic oligonucleotide
  source 1..19: mol_type = other RNA
cggcagtccattaagggcc

SEQ ID NO: 4032 - RNA, 19 nt, synthetic construct
  misc_feature 1..19: note = Description of Artificial Sequence: Synthetic oligonucleotide
  source 1..19: mol_type = other RNA
ccggcagtccattaagggc

SEQ ID NO: 4033 - RNA, 19 nt, synthetic construct
  misc_feature 1..19: note = Description of Artificial Sequence: Synthetic oligonucleotide
  source 1..19: mol_type = other RNA
cccggcagtccattaaggg

SEQ ID NO: 4034 - RNA, 19 nt, synthetic construct
  misc_feature 1..19: note = Description of Artificial Sequence: Synthetic oligonucleotide
  source 1..19: mol_type = other RNA
gcccggcagtccattaagg

SEQ ID NO: 4035 - RNA, 19 nt, synthetic construct
  misc_feature 1..19: note = Description of Artificial Sequence: Synthetic oligonucleotide
  source 1..19: mol_type = other RNA
ggcccggcagtccattaag

SEQ ID NO: 4036 - RNA, 19 nt, synthetic construct
  misc_feature 1..19: note = Description of Artificial Sequence: Synthetic oligonucleotide
  source 1..19: mol_type = other RNA
aggcccggcagtccattaa

SEQ ID NO: 4037 - RNA, 19 nt, synthetic construct
  misc_feature 1..19: note = Description of Artificial Sequence: Synthetic oligonucleotide
  source 1..19: mol_type = other RNA
aaggcccggcagtccatta

SEQ ID NO: 4038 - RNA, 19 nt, synthetic construct
  misc_feature 1..19: note = Description of Artificial Sequence: Synthetic oligonucleotide
  source 1..19: mol_type = other RNA
gaaggcccggcagtccatt

SEQ ID NO: 4039 - RNA, 19 nt, synthetic construct
  misc_feature 1..19: note = Description of Artificial Sequence: Synthetic oligonucleotide
  source 1..19: mol_type = other RNA
ggaaggcccggcagtccat

SEQ ID NO: 4040 - RNA, 19 nt, synthetic construct
  misc_feature 1..19: note = Description of Artificial Sequence: Synthetic oligonucleotide
  source 1..19: mol_type = other RNA
tggaaggcccggcagtcca

SEQ ID NO: 4041 - RNA, 19 nt, synthetic construct
  misc_feature 1..19: note = Description of Artificial Sequence: Synthetic oligonucleotide
  source 1..19: mol_type = other RNA
gtggaaggcccggcagtcc

SEQ ID NO: 4042 - RNA, 19 nt, synthetic construct
  misc_feature 1..19: note = Description of Artificial Sequence: Synthetic oligonucleotide
  source 1..19: mol_type = other RNA
agtggaaggcccggcagtc

SEQ ID NO: 4043 - RNA, 19 nt, synthetic construct
  misc_feature 1..19: note = Description of Artificial Sequence: Synthetic oligonucleotide
  source 1..19: mol_type = other RNA
tagtggaaggcccggcagt

SEQ ID NO: 4044 - RNA, 19 nt, synthetic construct
  misc_feature 1..19: note = Description of Artificial Sequence: Synthetic oligonucleotide
  source 1..19: mol_type = other RNA
gtagtggaaggcccggcag

SEQ ID NO: 4045 - RNA, 19 nt, synthetic construct
  misc_feature 1..19: note = Description of Artificial Sequence: Synthetic oligonucleotide
  source 1..19: mol_type = other RNA
tgtagtggaaggcccggca

SEQ ID NO: 4046 - RNA, 19 nt, synthetic construct
  misc_feature 1..19: note = Description of Artificial Sequence: Synthetic oligonucleotide
  source 1..19: mol_type = other RNA
ttgtagtggaaggcccggc

SEQ ID NO: 4047 - RNA, 19 nt, synthetic construct
  misc_feature 1..19: note = Description of Artificial Sequence: Synthetic oligonucleotide
  source 1..19: mol_type = other RNA
gttgtagtggaaggcccgg

SEQ ID NO: 4048 - RNA, 19 nt, synthetic construct
  misc_feature 1..19: note = Description of Artificial Sequence: Synthetic oligonucleotide
  source 1..19: mol_type = other RNA
cgttgtagtggaaggcccg

SEQ ID NO: 4049 - RNA, 19 nt, synthetic construct
  misc_feature 1..19: note = Description of Artificial Sequence: Synthetic oligonucleotide
  source 1..19: mol_type = other RNA
acgttgtagtggaaggccc

SEQ ID NO: 4050 - RNA, 19 nt, synthetic construct
  misc_feature 1..19: note = Description of Artificial Sequence: Synthetic oligonucleotide
  source 1..19: mol_type = other RNA
cacgttgtagtggaaggcc

SEQ ID NO: 4051 - RNA, 19 nt, synthetic construct
  misc_feature 1..19: note = Description of Artificial Sequence: Synthetic oligonucleotide
  source 1..19: mol_type = other RNA
tcacgttgtagtggaaggc

SEQ ID NO: 4052 - RNA, 19 nt, synthetic construct
  misc_feature 1..19: note = Description of Artificial Sequence: Synthetic oligonucleotide
  source 1..19: mol_type = other RNA
ctcacgttgtagtggaagg

SEQ ID NO: 4053 - RNA, 19 nt, synthetic construct
  misc_feature 1..19: note = Description of Artificial Sequence: Synthetic oligonucleotide
  source 1..19: mol_type = other RNA
gctcacgttgtagtggaag

SEQ ID NO: 4054 - RNA, 19 nt, synthetic construct
  misc_feature 1..19: note = Description of Artificial Sequence: Synthetic oligonucleotide
  source 1..19: mol_type = other RNA
tgctcacgttgtagtggaa

SEQ ID NO: 4055 - RNA, 19 nt, synthetic construct
  misc_feature 1..19: note = Description of Artificial Sequence: Synthetic oligonucleotide
  source 1..19: mol_type = other RNA
ctgctcacgttgtagtgga

SEQ ID NO: 4056 - RNA, 19 nt, synthetic construct
  misc_feature 1..19: note = Description of Artificial Sequence: Synthetic oligonucleotide
  source 1..19: mol_type = other RNA
gctgctcacgttgtagtgg

SEQ ID NO: 4057 - RNA, 19 nt, synthetic construct
  misc_feature 1..19: note = Description of Artificial Sequence: Synthetic oligonucleotide
  source 1..19: mol_type = other RNA
ggctgctcacgttgtagtg

SEQ ID NO: 4058 - RNA, 19 nt, synthetic construct
  misc_feature 1..19: note = Description of Artificial Sequence: Synthetic oligonucleotide
  source 1..19: mol_type = other RNA
tggctgctcacgttgtagt

SEQ ID NO: 4059 - RNA, 19 nt, synthetic construct
  misc_feature 1..19: note = Description of Artificial Sequence: Synthetic oligonucleotide
  source 1..19: mol_type = other RNA
atggctgctcacgttgtag

SEQ ID NO: 4060 - RNA, 19 nt, synthetic construct
  misc_feature 1..19: note = Description of Artificial Sequence: Synthetic oligonucleotide
  source 1..19: mol_type = other RNA
catggctgctcacgttgta

SEQ ID NO: 4061 - RNA, 19 nt, synthetic construct
  misc_feature 1..19: note = Description of Artificial Sequence: Synthetic oligonucleotide
  source 1..19: mol_type = other RNA
ccatggctgctcacgttgt

SEQ ID NO: 4062 - RNA, 19 nt, synthetic construct
  misc_feature 1..19: note = Description of Artificial Sequence: Synthetic oligonucleotide
  source 1..19: mol_type = other RNA
accatggctgctcacgttg

SEQ ID NO: 4063 - RNA, 19 nt, synthetic construct
  misc_feature 1..19: note = Description of Artificial Sequence: Synthetic oligonucleotide
  source 1..19: mol_type = other RNA
aaccatggctgctcacgtt

SEQ ID NO: 4064 - RNA, 19 nt, synthetic construct
  misc_feature 1..19: note = Description of Artificial Sequence: Synthetic oligonucleotide
  source 1..19: mol_type = other RNA
caaccatggctgctcacgt

SEQ ID NO: 4065 - RNA, 19 nt, synthetic construct
  misc_feature 1..19: note = Description of Artificial Sequence: Synthetic oligonucleotide
  source 1..19: mol_type = other RNA
gcaaccatggctgctcacg

SEQ ID NO: 4066 - RNA, 19 nt, synthetic construct
  misc_feature 1..19: note = Description of Artificial Sequence: Synthetic oligonucleotide
  source 1..19: mol_type = other RNA
ggcaaccatggctgctcac

SEQ ID NO: 4067 - RNA, 19 nt, synthetic construct
  misc_feature 1..19: note = Description of Artificial Sequence: Synthetic oligonucleotide
  source 1..19: mol_type = other RNA
tggcaaccatggctgctca

SEQ ID NO: 4068 - RNA, 19 nt, synthetic construct
  misc_feature 1..19: note = Description of Artificial Sequence: Synthetic oligonucleotide
  source 1..19: mol_type = other RNA
ttggcaaccatggctgctc

SEQ ID NO: 4069 - RNA, 19 nt, synthetic construct
  misc_feature 1..19: note = Description of Artificial Sequence: Synthetic oligonucleotide
  source 1..19: mol_type = other RNA
gttggcaaccatggctgct

SEQ ID NO: 4070 - RNA, 19 nt, synthetic construct
  misc_feature 1..19: note = Description of Artificial Sequence: Synthetic oligonucleotide
  source 1..19: mol_type = other RNA
agttggcaaccatggctgc

SEQ ID NO: 4071 - RNA, 19 nt, synthetic construct
  misc_feature 1..19: note = Description of Artificial Sequence: Synthetic oligonucleotide
  source 1..19: mol_type = other RNA
cagttggcaaccatggctg

SEQ ID NO: 4072 - RNA, 19 nt, synthetic construct
  misc_feature 1..19: note = Description of Artificial Sequence: Synthetic oligonucleotide
  source 1..19: mol_type = other RNA
gcagttggcaaccatggct

SEQ ID NO: 4073 - RNA, 19 nt, synthetic construct
  misc_feature 1..19: note = Description of Artificial Sequence: Synthetic oligonucleotide
  source 1..19: mol_type = other RNA
agcagttggcaaccatggc

SEQ ID NO: 4074 - RNA, 19 nt, synthetic construct
  misc_feature 1..19: note = Description of Artificial Sequence: Synthetic oligonucleotide
  source 1..19: mol_type = other RNA
cagcagttggcaaccatgg

SEQ ID NO: 4075 - RNA, 19 nt, synthetic construct
  misc_feature 1..19: note = Description of Artificial Sequence: Synthetic oligonucleotide
  source 1..19: mol_type = other RNA
gcagcagttggcaaccatg

SEQ ID NO: 4076 - RNA, 19 nt, synthetic construct
  misc_feature 1..19: note = Description of Artificial Sequence: Synthetic oligonucleotide
  source 1..19: mol_type = other RNA
ggcagcagttggcaaccat

SEQ ID NO: 4077 - RNA, 19 nt, synthetic construct
  misc_feature 1..19: note = Description of Artificial Sequence: Synthetic oligonucleotide
  source 1..19: mol_type = other RNA
tggcagcagttggcaacca

SEQ ID NO: 4078 - RNA, 19 nt, synthetic construct
  misc_feature 1..19: note = Description of Artificial Sequence: Synthetic oligonucleotide
  source 1..19: mol_type = other RNA
atggcagcagttggcaacc

SEQ ID NO: 4079 - RNA, 19 nt, synthetic construct
  misc_feature 1..19: note = Description of Artificial Sequence: Synthetic oligonucleotide
  source 1..19: mol_type = other RNA
catggcagcagttggcaac

SEQ ID NO: 4080 - RNA, 19 nt, synthetic construct
  misc_feature 1..19: note = Description of Artificial Sequence: Synthetic oligonucleotide
  source 1..19: mol_type = other RNA
ccatggcagcagttggcaa

SEQ ID NO: 4081 - RNA, 19 nt, synthetic construct
  misc_feature 1..19: note = Description of Artificial Sequence: Synthetic oligonucleotide
  source 1..19: mol_type = other RNA
tccatggcagcagttggca

SEQ ID NO: 4082 - RNA, 19 nt, synthetic construct
  misc_feature 1..19: note = Description of Artificial Sequence: Synthetic oligonucleotide
  source 1..19: mol_type = other RNA
gtccatggcagcagttggc

SEQ ID NO: 4083 - RNA, 19 nt, synthetic construct
  misc_feature 1..19: note = Description of Artificial Sequence: Synthetic oligonucleotide
  source 1..19: mol_type = other RNA
agtccatggcagcagttgg

SEQ ID NO: 4084 - RNA, 19 nt, synthetic construct
  misc_feature 1..19: note = Description of Artificial Sequence: Synthetic oligonucleotide
  source 1..19: mol_type = other RNA
gagtccatggcagcagttg

SEQ ID NO: 4085 - RNA, 19 nt, synthetic construct
  misc_feature 1..19: note = Description of Artificial Sequence: Synthetic oligonucleotide
  source 1..19: mol_type = other RNA
tgagtccatggcagcagtt

SEQ ID NO: 4086 - RNA, 19 nt, synthetic construct
  misc_feature 1..19: note = Description of Artificial Sequence: Synthetic oligonucleotide
  source 1..19: mol_type = other RNA
ttgagtccatggcagcagt

SEQ ID NO: 4087 - RNA, 19 nt, synthetic construct
  misc_feature 1..19: note = Description of Artificial Sequence: Synthetic oligonucleotide
  source 1..19: mol_type = other RNA
gttgagtccatggcagcag

SEQ ID NO: 4088 - RNA, 19 nt, synthetic construct
  misc_feature 1..19: note = Description of Artificial Sequence: Synthetic oligonucleotide
  source 1..19: mol_type = other RNA
tgttgagtccatggcagca

SEQ ID NO: 4089 - RNA, 19 nt, synthetic construct
  misc_feature 1..19: note = Description of Artificial Sequence: Synthetic oligonucleotide
  source 1..19: mol_type = other RNA
gtgttgagtccatggcagc

SEQ ID NO: 4090 - RNA, 19 nt, synthetic construct
  misc_feature 1..19: note = Description of Artificial Sequence: Synthetic oligonucleotide
  source 1..19: mol_type = other RNA
agtgttgagtccatggcag

SEQ ID NO: 4091 - RNA, 19 nt, synthetic construct
  misc_feature 1..19: note = Description of Artificial Sequence: Synthetic oligonucleotide
  source 1..19: mol_type = other RNA
gagtgttgagtccatggca

SEQ ID NO: 4092 - RNA, 19 nt, synthetic construct
  misc_feature 1..19: note = Description of Artificial Sequence: Synthetic oligonucleotide
  source 1..19: mol_type = other RNA
cgagtgttgagtccatggc

SEQ ID NO: 4093 - RNA, 19 nt, synthetic construct
  misc_feature 1..19: note = Description of Artificial Sequence: Synthetic oligonucleotide
  source 1..19: mol_type = other RNA
gcgagtgttgagtccatgg

SEQ ID NO: 4094 - RNA, 19 nt, synthetic construct
  misc_feature 1..19: note = Description of Artificial Sequence: Synthetic oligonucleotide
  source 1..19: mol_type = other RNA
ggcgagtgttgagtccatg

SEQ ID NO: 4095 - RNA, 19 nt, synthetic construct
  misc_feature 1..19: note = Description of Artificial Sequence: Synthetic oligonucleotide
  source 1..19: mol_type = other RNA
gggcgagtgttgagtccat

SEQ ID NO: 4096 - RNA, 19 nt, synthetic construct
  misc_feature 1..19: note = Description of Artificial Sequence: Synthetic oligonucleotide
  source 1..19: mol_type = other RNA
ggggcgagtgttgagtcca

SEQ ID NO: 4097 - RNA, 19 nt, synthetic construct
  misc_feature 1..19: note = Description of Artificial Sequence: Synthetic oligonucleotide
  source 1..19: mol_type = other RNA
tggggcgagtgttgagtcc

SEQ ID NO: 4098 - RNA, 19 nt, synthetic construct
  misc_feature 1..19: note = Description of Artificial Sequence: Synthetic oligonucleotide
  source 1..19: mol_type = other RNA
gtggggcgagtgttgagtc

SEQ ID NO: 4099 - RNA, 19 nt, synthetic construct
  misc_feature 1..19: note = Description of Artificial Sequence: Synthetic oligonucleotide
  source 1..19: mol_type = other RNA
tgtggggcgagtgttgagt

SEQ ID NO: 4100 - RNA, 19 nt, synthetic construct
  misc_feature 1..19: note = Description of Artificial Sequence: Synthetic oligonucleotide
  source 1..19: mol_type = other RNA
gtgtggggcgagtgttgag

SEQ ID NO: 4101 - RNA, 19 nt, synthetic construct
  misc_feature 1..19: note = Description of Artificial Sequence: Synthetic oligonucleotide
  source 1..19: mol_type = other RNA
cgtgtggggcgagtgttga

SEQ ID NO: 4102 - RNA, 19 nt, synthetic construct
  misc_feature 1..19: note = Description of Artificial Sequence: Synthetic oligonucleotide
  source 1..19: mol_type = other RNA
tcgtgtggggcgagtgttg

SEQ ID NO: 4103 - RNA, 19 nt, synthetic construct
  misc_feature 1..19: note = Description of Artificial Sequence: Synthetic oligonucleotide
  source 1..19: mol_type = other RNA
ctcgtgtggggcgagtgtt

SEQ ID NO: 4104 - RNA, 19 nt, synthetic construct
  misc_feature 1..19: note = Description of Artificial Sequence: Synthetic oligonucleotide
  source 1..19: mol_type = other RNA
cctcgtgtggggcgagtgt

SEQ ID NO: 4105 - RNA, 19 nt, synthetic construct
  misc_feature 1..19: note = Description of Artificial Sequence: Synthetic oligonucleotide
  source 1..19: mol_type = other RNA
gcctcgtgtggggcgagtg

SEQ ID NO: 4106 - RNA, 19 nt, synthetic construct
  misc_feature 1..19: note = Description of Artificial Sequence: Synthetic oligonucleotide
  source 1..19: mol_type = other RNA
agcctcgtgtggggcgagt

SEQ ID NO: 4107 - RNA, 19 nt, synthetic construct
  misc_feature 1..19: note = Description of Artificial Sequence: Synthetic oligonucleotide
  source 1..19: mol_type = other RNA
cagcctcgtgtggggcgag

SEQ ID NO: 4108 - RNA, 19 nt, synthetic construct
  misc_feature 1..19: note = Description of Artificial Sequence: Synthetic oligonucleotide
  source 1..19: mol_type = other RNA
gcagcctcgtgtggggcga

SEQ ID NO: 4109 - RNA, 19 nt, synthetic construct
  misc_feature 1..19: note = Description of Artificial Sequence: Synthetic oligonucleotide
  source 1..19: mol_type = other RNA
cgcagcctcgtgtggggcg

SEQ ID NO: 4110 - RNA, 19 nt, synthetic construct
  misc_feature 1..19: note = Description of Artificial Sequence: Synthetic oligonucleotide
  source 1..19: mol_type = other RNA
ccgcagcctcgtgtggggc

SEQ ID NO: 4111 - RNA, 19 nt, synthetic construct
  misc_feature 1..19: note = Description of Artificial Sequence: Synthetic oligonucleotide
  source 1..19: mol_type = other RNA
gccgcagcctcgtgtgggg

SEQ ID NO: 4112 - RNA, 19 nt, synthetic construct
  misc_feature 1..19: note = Description of Artificial Sequence: Synthetic oligonucleotide
  source 1..19: mol_type = other RNA
cgccgcagcctcgtgtggg

SEQ ID NO: 4113 - RNA, 19 nt, synthetic construct
  misc_feature 1..19: note = Description of Artificial Sequence: Synthetic oligonucleotide
  source 1..19: mol_type = other RNA
acgccgcagcctcgtgtgg

SEQ ID NO: 4114 - RNA, 19 nt, synthetic construct
  misc_feature 1..19: note = Description of Artificial Sequence: Synthetic oligonucleotide
  source 1..19: mol_type = other RNA
aacgccgcagcctcgtgtg

SEQ ID NO: 4115 - RNA, 19 nt, synthetic construct
  misc_feature 1..19: note = Description of Artificial Sequence: Synthetic oligonucleotide
  source 1..19: mol_type = other RNA
gaacgccgcagcctcgtgt

SEQ ID NO: 4116 - RNA, 19 nt, synthetic construct
  misc_feature 1..19: note = Description of Artificial Sequence: Synthetic oligonucleotide
  source 1..19: mol_type = other RNA
agaacgccgcagcctcgtg

SEQ ID NO: 4117 - RNA, 19 nt, synthetic construct
  misc_feature 1..19: note = Description of Artificial Sequence: Synthetic oligonucleotide
  source 1..19: mol_type = other RNA
cagaacgccgcagcctcgt

SEQ ID NO: 4118 - RNA, 19 nt, synthetic construct
  misc_feature 1..19: note = Description of Artificial Sequence: Synthetic oligonucleotide
  source 1..19: mol_type = other RNA
ccagaacgccgcagcctcg

SEQ ID NO: 4119 - RNA, 19 nt, synthetic construct
  misc_feature 1..19: note = Description of Artificial Sequence: Synthetic oligonucleotide
  source 1..19: mol_type = other RNA
cccagaacgccgcagcctc

SEQ ID NO: 4120 - RNA, 19 nt, synthetic construct
  misc_feature 1..19: note = Description of Artificial Sequence: Synthetic oligonucleotide
  source 1..19: mol_type = other RNA
gcccagaacgccgcagcct

SEQ ID NO: 4121 - RNA, 19 nt, synthetic construct
  misc_feature 1..19: note = Description of Artificial Sequence: Synthetic oligonucleotide
  source 1..19: mol_type = other RNA
cgcccagaacgccgcagcc

SEQ ID NO: 4122 - RNA, 19 nt, synthetic construct
  misc_feature 1..19: note = Description of Artificial Sequence: Synthetic oligonucleotide
  source 1..19: mol_type = other RNA
gcgcccagaacgccgcagc

SEQ ID NO: 4123 - RNA, 19 nt, synthetic construct
  misc_feature 1..19: note = Description of Artificial Sequence: Synthetic oligonucleotide
  source 1..19: mol_type = other RNA
agcgcccagaacgccgcag

SEQ ID NO: 4124 - RNA, 19 nt, synthetic construct
  misc_feature 1..19: note = Description of Artificial Sequence: Synthetic oligonucleotide
  source 1..19: mol_type = other RNA
cagcgcccagaacgccgca

SEQ ID NO: 4125 - RNA, 19 nt, synthetic construct
  misc_feature 1..19: note = Description of Artificial Sequence: Synthetic oligonucleotide
  source 1..19: mol_type = other RNA
acagcgcccagaacgccgc

SEQ ID NO: 4126 - RNA, 19 nt, synthetic construct
  misc_feature 1..19: note = Description of Artificial Sequence: Synthetic oligonucleotide
  source 1..19: mol_type = other RNA
cacagcgcccagaacgccg

SEQ ID NO: 4127 - RNA, 19 nt, synthetic construct
  misc_feature 1..19: note = Description of Artificial Sequence: Synthetic oligonucleotide
  source 1..19: mol_type = other RNA
tcacagcgcccagaacgcc

SEQ ID NO: 4128 - RNA, 19 nt, synthetic construct
  misc_feature 1..19: note = Description of Artificial Sequence: Synthetic oligonucleotide
  source 1..19: mol_type = other RNA
gtcacagcgcccagaacgc

SEQ ID NO: 4129 - RNA, 19 nt, synthetic construct
  misc_feature 1..19: note = Description of Artificial Sequence: Synthetic oligonucleotide
  source 1..19: mol_type = other RNA
ggtcacagcgcccagaacg

SEQ ID NO: 4130 - RNA, 19 nt, synthetic construct
  misc_feature 1..19: note = Description of Artificial Sequence: Synthetic oligonucleotide
  source 1..19: mol_type = other RNA
aggtcacagcgcccagaac

SEQ ID NO: 4131 - RNA, 19 nt, synthetic construct
  misc_feature 1..19: note = Description of Artificial Sequence: Synthetic oligonucleotide
  source 1..19: mol_type = other RNA
gaggtcacagcgcccagaa

SEQ ID NO: 4132 - RNA, 19 nt, synthetic construct
  misc_feature 1..19: note = Description of Artificial Sequence: Synthetic oligonucleotide
  source 1..19: mol_type = other RNA
agaggtcacagcgcccaga

SEQ ID NO: 4133 - RNA, 19 nt, synthetic construct
  misc_feature 1..19: note = Description of Artificial Sequence: Synthetic oligonucleotide
  source 1..19: mol_type = other RNA
aagaggtcacagcgcccag

SEQ ID NO: 4134 - RNA, 19 nt, synthetic construct
  misc_feature 1..19: note = Description of Artificial Sequence: Synthetic oligonucleotide
  source 1..19: mol_type = other RNA
gaagaggtcacagcgccca

SEQ ID NO: 4135 - RNA, 19 nt, synthetic construct
  misc_feature 1..19: note = Description of Artificial Sequence: Synthetic oligonucleotide
  source 1..19: mol_type = other RNA
ggaagaggtcacagcgccc

SEQ ID NO: 4136 - RNA, 19 nt, synthetic construct
  misc_feature 1..19: note = Description of Artificial Sequence: Synthetic oligonucleotide
  source 1..19: mol_type = other RNA
tggaagaggtcacagcgcc

SEQ ID NO: 4137 - RNA, 19 nt, synthetic construct
  misc_feature 1..19: note = Description of Artificial Sequence: Synthetic oligonucleotide
  source 1..19: mol_type = other RNA
ctggaagaggtcacagcgc

SEQ ID NO: 4138 - RNA, 19 nt, synthetic construct
  misc_feature 1..19: note = Description of Artificial Sequence: Synthetic oligonucleotide
  source 1..19: mol_type = other RNA
tctggaagaggtcacagcg

SEQ ID NO: 4139 - RNA, 19 nt, synthetic construct
  misc_feature 1..19: note = Description of Artificial Sequence: Synthetic oligonucleotide
  source 1..19: mol_type = other RNA
ttctggaagaggtcacagc

SEQ ID NO: 4140 - RNA, 19 nt, synthetic construct
  misc_feature 1..19: note = Description of Artificial Sequence: Synthetic oligonucleotide
  source 1..19: mol_type = other RNA
cttctggaagaggtcacag

SEQ ID NO: 4141 - RNA, 19 nt, synthetic construct
  misc_feature 1..19: note = Description of Artificial Sequence: Synthetic oligonucleotide
  source 1..19: mol_type = other RNA
tcttctggaagaggtcaca

SEQ ID NO: 4142 - RNA, 19 nt, synthetic construct
  misc_feature 1..19: note = Description of Artificial Sequence: Synthetic oligonucleotide
  source 1..19: mol_type = other RNA
ttcttctggaagaggtcac

SEQ ID NO: 4143 - RNA, 19 nt, synthetic construct
  misc_feature 1..19: note = Description of Artificial Sequence: Synthetic oligonucleotide
  source 1..19: mol_type = other RNA
tttcttctggaagaggtca

SEQ ID NO: 4144 - RNA, 19 nt, synthetic construct
  misc_feature 1..19: note = Description of Artificial Sequence: Synthetic oligonucleotide
  source 1..19: mol_type = other RNA
ctttcttctggaagaggtc

SEQ ID NO: 4145 - RNA, 19 nt, synthetic construct
  misc_feature 1..19: note = Description of Artificial Sequence: Synthetic oligonucleotide
  source 1..19: mol_type = other RNA
tctttcttctggaagaggt

SEQ ID NO: 4146 - RNA, 19 nt, synthetic construct
  misc_feature 1..19: note = Description of Artificial Sequence: Synthetic oligonucleotide
  source 1..19: mol_type = other RNA
gtctttcttctggaagagg

SEQ ID NO: 4147 - RNA, 19 nt, synthetic construct
  misc_feature 1..19: note = Description of Artificial Sequence: Synthetic oligonucleotide
  source 1..19: mol_type = other RNA
agtctttcttctggaagag

SEQ ID NO: 4148 - RNA, 19 nt, synthetic construct
  misc_feature 1..19: note = Description of Artificial Sequence: Synthetic oligonucleotide
  source 1..19: mol_type = other RNA
tagtctttcttctggaaga

SEQ ID NO: 4149 - RNA, 19 nt, synthetic construct
  misc_feature 1..19: note = Description of Artificial Sequence: Synthetic oligonucleotide
  source 1..19: mol_type = other RNA
gtagtctttcttctggaag

SEQ ID NO: 4150 - RNA, 19 nt, synthetic construct
  misc_feature 1..19: note = Description of Artificial Sequence: Synthetic oligonucleotide
  source 1..19: mol_type = other RNA
cgtagtctttcttctggaa

SEQ ID NO: 4151 - RNA, 19 nt, synthetic construct
  misc_feature 1..19: note = Description of Artificial Sequence: Synthetic oligonucleotide
  source 1..19: mol_type = other RNA
acgtagtctttcttctgga

SEQ ID NO: 4152 - RNA, 19 nt, synthetic construct
  misc_feature 1..19: note = Description of Artificial Sequence: Synthetic oligonucleotide
  source 1..19: mol_type = other RNA
tacgtagtctttcttctgg

SEQ ID NO: 4153 - RNA, 19 nt, synthetic construct
  misc_feature 1..19: note = Description of Artificial Sequence: Synthetic oligonucleotide
  source 1..19: mol_type = other RNA
gtacgtagtctttcttctg

SEQ ID NO: 4154 - RNA, 19 nt, synthetic construct
  misc_feature 1..19: note = Description of Artificial Sequence: Synthetic oligonucleotide
  source 1..19: mol_type = other RNA
cgtacgtagtctttcttct

SEQ ID NO: 4155 - RNA, 19 nt, synthetic construct
  misc_feature 1..19: note = Description of Artificial Sequence: Synthetic oligonucleotide
  source 1..19: mol_type = other RNA
ccgtacgtagtctttcttc

SEQ ID NO: 4156 - RNA, 19 nt, synthetic construct
  misc_feature 1..19: note = Description of Artificial Sequence: Synthetic oligonucleotide
  source 1..19: mol_type = other RNA
tccgtacgtagtctttctt

SEQ ID NO: 4157 - RNA, 19 nt, synthetic construct
  misc_feature 1..19: note = Description of Artificial Sequence: Synthetic oligonucleotide
  source 1..19: mol_type = other RNA
gtccgtacgtagtctttct

SEQ ID NO: 4158 - RNA, 19 nt, synthetic construct
  misc_feature 1..19: note = Description of Artificial Sequence: Synthetic oligonucleotide
  source 1..19: mol_type = other RNA
ggtccgtacgtagtctttc

SEQ ID NO: 4159 - RNA, 19 nt, synthetic construct
  misc_feature 1..19: note = Description of Artificial Sequence: Synthetic oligonucleotide
  source 1..19: mol_type = other RNA
aggtccgtacgtagtcttt

SEQ ID NO: 4160 - RNA, 19 nt, synthetic construct
  misc_feature 1..19: note = Description of Artificial Sequence: Synthetic oligonucleotide
  source 1..19: mol_type = other RNA
caggtccgtacgtagtctt

SEQ ID NO: 4161 - RNA, 19 nt, synthetic construct
  misc_feature 1..19: note = Description of Artificial Sequence: Synthetic oligonucleotide
  source 1..19: mol_type = other RNA
gcaggtccgtacgtagtct

SEQ ID NO: 4162 - RNA, 19 nt, synthetic construct
  misc_feature 1..19: note = Description of Artificial Sequence: Synthetic oligonucleotide
  source 1..19: mol_type = other RNA
tgcaggtccgtacgtagtc

SEQ ID NO: 4163 - RNA, 19 nt, synthetic construct
  misc_feature 1..19: note = Description of Artificial Sequence: Synthetic oligonucleotide
  source 1..19: mol_type = other RNA
atgcaggtccgtacgtagt

SEQ ID NO: 4164 - RNA, 19 nt, synthetic construct
  misc_feature 1..19: note = Description of Artificial Sequence: Synthetic oligonucleotide
  source 1..19: mol_type = other RNA
gatgcaggtccgtacgtag

SEQ ID NO: 4165 - RNA, 19 nt, synthetic construct
  misc_feature 1..19: note = Description of Artificial Sequence: Synthetic oligonucleotide
  source 1..19: mol_type = other RNA
tgatgcaggtccgtacgta

SEQ ID NO: 4166 - RNA, 19 nt, synthetic construct
  misc_feature 1..19: note = Description of Artificial Sequence: Synthetic oligonucleotide
  source 1..19: mol_type = other RNA
atgatgcaggtccgtacgt

SEQ ID NO: 4167 - RNA, 19 nt, synthetic construct
  misc_feature 1..19: note = Description of Artificial Sequence: Synthetic oligonucleotide
  source 1..19: mol_type = other RNA
catgatgcaggtccgtacg

SEQ ID NO: 4168 - RNA, 19 nt, synthetic construct
  misc_feature 1..19: note = Description of Artificial Sequence: Synthetic oligonucleotide
  source 1..19: mol_type = other RNA
tcatgatgcaggtccgtac

SEQ ID NO: 4169 - RNA, 19 nt, synthetic construct
  misc_feature 1..19: note = Description of Artificial Sequence: Synthetic oligonucleotide
  source 1..19: mol_type = other RNA
ttcatgatgcaggtccgta

SEQ ID NO: 4170 - RNA, 19 nt, synthetic construct
  misc_feature 1..19: note = Description of Artificial Sequence: Synthetic oligonucleotide
  source 1..19: mol_type = other RNA
gttcatgatgcaggtccgt

SEQ ID NO: 4171 - RNA, 19 nt, synthetic construct
  misc_feature 1..19: note = Description of Artificial Sequence: Synthetic oligonucleotide
  source 1..19: mol_type = other RNA
tgttcatgatgcaggtccg

SEQ ID NO: 4172 - RNA, 19 nt, synthetic construct
  misc_feature 1..19: note = Description of Artificial Sequence: Synthetic oligonucleotide
  source 1..19: mol_type = other RNA
ttgttcatgatgcaggtcc

SEQ ID NO: 4173 - RNA, 19 nt, synthetic construct
  misc_feature 1..19: note = Description of Artificial Sequence: Synthetic oligonucleotide
  source 1..19: mol_type = other RNA
attgttcatgatgcaggtc

SEQ ID NO: 4174 - RNA, 19 nt, synthetic construct
  misc_feature 1..19: note = Description of Artificial Sequence: Synthetic oligonucleotide
  source 1..19: mol_type = other RNA
cattgttcatgatgcaggt

SEQ ID NO: 4175 - RNA, 19 nt, synthetic construct
  misc_feature 1..19: note = Description of Artificial Sequence: Synthetic oligonucleotide
  source 1..19: mol_type = other RNA
ccattgttcatgatgcagg

SEQ ID NO: 4176 - RNA, 19 nt, synthetic construct
  misc_feature 1..19: note = Description of Artificial Sequence: Synthetic oligonucleotide
  source 1..19: mol_type = other RNA
cccattgttcatgatgcag

SEQ ID NO: 4177 - RNA, 19 nt, synthetic construct
  misc_feature 1..19: note = Description of Artificial Sequence: Synthetic oligonucleotide
  source 1..19: mol_type = other RNA
ccccattgttcatgatgca

SEQ ID NO: 4178 - RNA, 19 nt, synthetic construct
  misc_feature 1..19: note = Description of Artificial Sequence: Synthetic oligonucleotide
  source 1..19: mol_type = other RNA
accccattgttcatgatgc

SEQ ID NO: 4179 - RNA, 19 nt, synthetic construct
  misc_feature 1..19: note = Description of Artificial Sequence: Synthetic oligonucleotide
  source 1..19: mol_type = other RNA
aaccccattgttcatgatg

SEQ ID NO: 4180 - RNA, 19 nt, synthetic construct
  misc_feature 1..19: note = Description of Artificial Sequence: Synthetic oligonucleotide
  source 1..19: mol_type = other RNA
caaccccattgttcatgat

SEQ ID NO: 4181 - RNA, 19 nt, synthetic construct
  misc_feature 1..19: note = Description of Artificial Sequence: Synthetic oligonucleotide
  source 1..19: mol_type = other RNA
ccaaccccattgttcatga

SEQ ID NO: 4182 - RNA, 19 nt, synthetic construct
  misc_feature 1..19: note = Description of Artificial Sequence: Synthetic oligonucleotide
  source 1..19: mol_type = other RNA
cccaaccccattgttcatg

SEQ ID NO: 4183 - RNA, 19 nt, synthetic construct
  misc_feature 1..19: note = Description of Artificial Sequence: Synthetic oligonucleotide
  source 1..19: mol_type = other RNA
acccaaccccattgttcat

SEQ ID NO: 4184 - RNA, 19 nt, synthetic construct
  misc_feature 1..19: note = Description of Artificial Sequence: Synthetic oligonucleotide
  source 1..19: mol_type = other RNA
tacccaaccccattgttca

SEQ ID NO: 4185 - RNA, 19 nt, synthetic construct
  misc_feature 1..19: note = Description of Artificial Sequence: Synthetic oligonucleotide
  source 1..19: mol_type = other RNA
gtacccaaccccattgttc

SEQ ID NO: 4186 - RNA, 19 nt, synthetic construct
  misc_feature 1..19: note = Description of Artificial Sequence: Synthetic oligonucleotide
  source 1..19: mol_type = other RNA
ggtacccaaccccattgtt

SEQ ID NO: 4187 - RNA, 19 nt, synthetic construct
  misc_feature 1..19: note = Description of Artificial Sequence: Synthetic oligonucleotide
  source 1..19: mol_type = other RNA
cggtacccaaccccattgt

SEQ ID NO: 4188 - RNA, 19 nt, synthetic construct
  misc_feature 1..19: note = Description of Artificial Sequence: Synthetic oligonucleotide
  source 1..19: mol_type = other RNA
ccggtacccaaccccattg

SEQ ID NO: 4189 - RNA, 19 nt, synthetic construct
  misc_feature 1..19: note = Description of Artificial Sequence: Synthetic oligonucleotide
  source 1..19: mol_type = other RNA
cccggtacccaaccccatt

SEQ ID NO: 4190 - RNA, 19 nt, synthetic construct
  misc_feature 1..19: note = Description of Artificial Sequence: Synthetic oligonucleotide
  source 1..19: mol_type = other RNA
ccccggtacccaaccccat

SEQ ID NO: 4191 - RNA, 19 nt, synthetic construct
  misc_feature 1..19: note = Description of Artificial Sequence: Synthetic oligonucleotide
  source 1..19: mol_type = other RNA
gccccggtacccaacccca

SEQ ID NO: 4192 - RNA, 19 nt, synthetic construct
  misc_feature 1..19: note = Description of Artificial Sequence: Synthetic oligonucleotide
  source 1..19: mol_type = other RNA
tgccccggtacccaacccc

SEQ ID NO: 4193 - RNA, 19 nt, synthetic construct
  misc_feature 1..19: note = Description of Artificial Sequence: Synthetic oligonucleotide
  source 1..19: mol_type = other RNA
gtgccccggtacccaaccc

SEQ ID NO: 4194 - RNA, 19 nt, synthetic construct
  misc_feature 1..19: note = Description of Artificial Sequence: Synthetic oligonucleotide
  source 1..19: mol_type = other RNA
ggtgccccggtacccaacc

SEQ ID NO: 4195 - RNA, 19 nt, synthetic construct
  misc_feature 1..19: note = Description of Artificial Sequence: Synthetic oligonucleotide
  source 1..19: mol_type = other RNA
tggtgccccggtacccaac

SEQ ID NO: 4196 - RNA, 19 nt, synthetic construct
  misc_feature 1..19: note = Description of Artificial Sequence: Synthetic oligonucleotide
  source 1..19: mol_type = other RNA
atggtgccccggtacccaa

SEQ ID NO: 4197 - RNA, 19 nt, synthetic construct
  misc_feature 1..19: note = Description of Artificial Sequence: Synthetic oligonucleotide
  source 1..19: mol_type = other RNA
catggtgccccggtaccca

SEQ ID NO: 4198 - RNA, 19 nt, synthetic construct
  misc_feature 1..19: note = Description of Artificial Sequence: Synthetic oligonucleotide
  source 1..19: mol_type = other RNA
ccatggtgccccggtaccc

SEQ ID NO: 4199 - RNA, 19 nt, synthetic construct
  misc_feature 1..19: note = Description of Artificial Sequence: Synthetic oligonucleotide
  source 1..19: mol_type = other RNA
gccatggtgccccggtacc

SEQ ID NO: 4200 - RNA, 19 nt, synthetic construct
  misc_feature 1..19: note = Description of Artificial Sequence: Synthetic oligonucleotide
  source 1..19: mol_type = other RNA
ggccatggtgccccggtac

SEQ ID NO: 4201 - RNA, 19 nt, synthetic construct
  misc_feature 1..19: note = Description of Artificial Sequence: Synthetic oligonucleotide
  source 1..19: mol_type = other RNA
tggccatggtgccccggta

SEQ ID NO: 4202 - RNA, 19 nt, synthetic construct
  misc_feature 1..19: note = Description of Artificial Sequence: Synthetic oligonucleotide
  source 1..19: mol_type = other RNA
gtggccatggtgccccggt

SEQ ID NO: 4203 - RNA, 19 nt, synthetic construct
  misc_feature 1..19: note = Description of Artificial Sequence: Synthetic oligonucleotide
  source 1..19: mol_type = other RNA
cgtggccatggtgccccgg

SEQ ID NO: 4204 - RNA, 19 nt, synthetic construct
  misc_feature 1..19: note = Description of Artificial Sequence: Synthetic oligonucleotide
  source 1..19: mol_type = other RNA
tcgtggccatggtgccccg

SEQ ID NO: 4205 - RNA, 19 nt, synthetic construct
  misc_feature 1..19: note = Description of Artificial Sequence: Synthetic oligonucleotide
  source 1..19: mol_type = other RNA
gtcgtggccatggtgcccc

SEQ ID NO: 4206 - RNA, 19 nt, synthetic construct
  misc_feature 1..19: note = Description of Artificial Sequence: Synthetic oligonucleotide
  source 1..19: mol_type = other RNA
ggtcgtggccatggtgccc

SEQ ID NO: 4207 - RNA, 19 nt, synthetic construct
  misc_feature 1..19: note = Description of Artificial Sequence: Synthetic oligonucleotide
  source 1..19: mol_type = other RNA
cggtcgtggccatggtgcc

SEQ ID NO: 4208 - RNA, 19 nt, synthetic construct
  misc_feature 1..19: note = Description of Artificial Sequence: Synthetic oligonucleotide
  source 1..19: mol_type = other RNA
acggtcgtggccatggtgc

SEQ ID NO: 4209 - RNA, 19 nt, synthetic construct
  misc_feature 1..19: note = Description of Artificial Sequence: Synthetic oligonucleotide
  source 1..19: mol_type = other RNA
cacggtcgtggccatggtg

SEQ ID NO: 4210 - RNA, 19 nt, synthetic construct
  misc_feature 1..19: note = Description of Artificial Sequence: Synthetic oligonucleotide
  source 1..19: mol_type = other RNA
ccacggtcgtggccatggt

SEQ ID NO: 4211 - RNA, 19 nt, synthetic construct
  misc_feature 1..19: note = Description of Artificial Sequence: Synthetic oligonucleotide
  source 1..19: mol_type = other RNA
cccacggtcgtggccatgg

SEQ ID NO: 4212 - RNA, 19 nt, synthetic construct
  misc_feature 1..19: note = Description of Artificial Sequence: Synthetic oligonucleotide
  source 1..19: mol_type = other RNA
acccacggtcgtggccatg

SEQ ID NO: 4213 - RNA, 19 nt, synthetic construct
  misc_feature 1..19: note = Description of Artificial Sequence: Synthetic oligonucleotide
  source 1..19: mol_type = other RNA
cacccacggtcgtggccat

SEQ ID NO: 4214 - RNA, 19 nt, synthetic construct
  misc_feature 1..19: note = Description of Artificial Sequence: Synthetic oligonucleotide
  source 1..19: mol_type = other RNA
ccacccacggtcgtggcca

SEQ ID NO: 4215 - RNA, 19 nt, synthetic construct
  misc_feature 1..19: note = Description of Artificial Sequence: Synthetic oligonucleotide
  source 1..19: mol_type = other RNA
gccacccacggtcgtggcc

SEQ ID NO: 4216 - RNA, 19 nt, synthetic construct
  misc_feature 1..19: note = Description of Artificial Sequence: Synthetic oligonucleotide
  source 1..19: mol_type = other RNA
ggccacccacggtcgtggc

SEQ ID NO: 4217 - RNA, 19 nt, synthetic construct
  misc_feature 1..19: note = Description of Artificial Sequence: Synthetic oligonucleotide
  source 1..19: mol_type = other RNA
aggccacccacggtcgtgg

SEQ ID NO: 4218 - RNA, 19 nt, synthetic construct
  misc_feature 1..19: note = Description of Artificial Sequence: Synthetic oligonucleotide
  source 1..19: mol_type = other RNA
caggccacccacggtcgtg

SEQ ID NO: 4219 - RNA, 19 nt, synthetic construct
  misc_feature 1..19: note = Description of Artificial Sequence: Synthetic oligonucleotide
  source 1..19: mol_type = other RNA
gcaggccacccacggtcgt

SEQ ID NO: 4220 - RNA, 19 nt, synthetic construct
  misc_feature 1..19: note = Description of Artificial Sequence: Synthetic oligonucleotide
  source 1..19: mol_type = other RNA
ggcaggccacccacggtcg

SEQ ID NO: 4221 - RNA, 19 nt, synthetic construct
  misc_feature 1..19: note = Description of Artificial Sequence: Synthetic oligonucleotide
  source 1..19: mol_type = other RNA
gggcaggccacccacggtc

SEQ ID NO: 4222 - RNA, 19 nt, synthetic construct
  misc_feature 1..19: note = Description of Artificial Sequence: Synthetic oligonucleotide
  source 1..19: mol_type = other RNA
agggcaggccacccacggt

SEQ ID NO: 4223 - RNA, 19 nt, synthetic construct
  misc_feature 1..19: note = Description of Artificial Sequence: Synthetic oligonucleotide
  source 1..19: mol_type = other RNA
cagggcaggccacccacgg

SEQ ID NO: 4224 - RNA, 19 nt, synthetic construct
  misc_feature 1..19: note = Description of Artificial Sequence: Synthetic oligonucleotide
  source 1..19: mol_type = other RNA
gcagggcaggccacccacg

SEQ ID NO: 4225 - RNA, 19 nt, synthetic construct
  misc_feature 1..19: note = Description of Artificial Sequence: Synthetic oligonucleotide
  source 1..19: mol_type = other RNA
ggcagggcaggccacccac

SEQ ID NO: 4226 - RNA, 19 nt, synthetic construct
  misc_feature 1..19: note = Description of Artificial Sequence: Synthetic oligonucleotide
  source 1..19: mol_type = other RNA
tggcagggcaggccaccca

SEQ ID NO: 4227 - RNA, 19 nt, synthetic construct
  misc_feature 1..19: note = Description of Artificial Sequence: Synthetic oligonucleotide
  source 1..19: mol_type = other RNA
ctggcagggcaggccaccc

SEQ ID NO: 4228 - RNA, 19 nt, synthetic construct
  misc_feature 1..19: note = Description of Artificial Sequence: Synthetic oligonucleotide
  source 1..19: mol_type = other RNA
cctggcagggcaggccacc

SEQ ID NO: 4229 - RNA, 19 nt, synthetic construct
  misc_feature 1..19: note = Description of Artificial Sequence: Synthetic oligonucleotide
  source 1..19: mol_type = other RNA
gcctggcagggcaggccac

SEQ ID NO: 4230 - RNA, 19 nt, synthetic construct
  misc_feature 1..19: note = Description of Artificial Sequence: Synthetic oligonucleotide
  source 1..19: mol_type = other RNA
agcctggcagggcaggcca

SEQ ID NO: 4231 - RNA, 19 nt, synthetic construct
  misc_feature 1..19: note = Description of Artificial Sequence: Synthetic oligonucleotide
  source 1..19: mol_type = other RNA
aagcctggcagggcaggcc

SEQ ID NO: 4232 - RNA, 19 nt, synthetic construct
  misc_feature 1..19: note = Description of Artificial Sequence: Synthetic oligonucleotide
  source 1..19: mol_type = other RNA
caagcctggcagggcaggc

SEQ ID NO: 4233 - RNA, 19 nt, synthetic construct
  misc_feature 1..19: note = Description of Artificial Sequence: Synthetic oligonucleotide
  source 1..19: mol_type = other RNA
ccaagcctggcagggcagg

SEQ ID NO: 4234 - RNA, 19 nt, synthetic construct
  misc_feature 1..19: note = Description of Artificial Sequence: Synthetic oligonucleotide
  source 1..19: mol_type = other RNA
tccaagcctggcagggcag

SEQ ID NO: 4235 - RNA, 19 nt, synthetic construct
  misc_feature 1..19: note = Description of Artificial Sequence: Synthetic oligonucleotide
  source 1..19: mol_type = other RNA
ctccaagcctggcagggca

SEQ ID NO: 4236 - RNA, 19 nt, synthetic construct
  misc_feature 1..19: note = Description of Artificial Sequence: Synthetic oligonucleotide
  source 1..19: mol_type = other RNA
gctccaagcctggcagggc

SEQ ID NO: 4237 - RNA, 19 nt, synthetic construct
  misc_feature 1..19: note = Description of Artificial Sequence: Synthetic oligonucleotide
  source 1..19: mol_type = other RNA
ggctccaagcctggcaggg

SEQ ID NO: 4238 - RNA, 19 nt, synthetic construct
  misc_feature 1..19: note = Description of Artificial Sequence: Synthetic oligonucleotide
  source 1..19: mol_type = other RNA
tggctccaagcctggcagg

SEQ ID NO: 4239 - RNA, 19 nt, synthetic construct
  misc_feature 1..19: note = Description of Artificial Sequence: Synthetic oligonucleotide
  source 1..19: mol_type = other RNA
gtggctccaagcctggcag

SEQ ID NO: 4240 - RNA, 19 nt, synthetic construct
  misc_feature 1..19: note = Description of Artificial Sequence: Synthetic oligonucleotide
  source 1..19: mol_type = other RNA
tgtggctccaagcctggca

SEQ ID NO: 4241 - RNA, 19 nt, synthetic construct
  misc_feature 1..19: note = Description of Artificial Sequence: Synthetic oligonucleotide
  source 1..19: mol_type = other RNA
ttgtggctccaagcctggc

SEQ ID NO: 4242 - RNA, 19 nt, synthetic construct
  misc_feature 1..19: note = Description of Artificial Sequence: Synthetic oligonucleotide
  source 1..19: mol_type = other RNA
cttgtggctccaagcctgg

SEQ ID NO: 4243 - RNA, 19 nt, synthetic construct
  misc_feature 1..19: note = Description of Artificial Sequence: Synthetic oligonucleotide
  source 1..19: mol_type = other RNA
acttgtggctccaagcctg

SEQ ID NO: 4244 - RNA, 19 nt, synthetic construct
  misc_feature 1..19: note = Description of Artificial Sequence: Synthetic oligonucleotide
  source 1..19: mol_type = other RNA
aacttgtggctccaagcct

SEQ ID NO: 4245 - RNA, 19 nt, synthetic construct
  misc_feature 1..19: note = Description of Artificial Sequence: Synthetic oligonucleotide
  source 1..19: mol_type = other RNA
gaacttgtggctccaagcc

SEQ ID NO: 4246 - RNA, 19 nt, synthetic construct
  misc_feature 1..19: note = Description of Artificial Sequence: Synthetic oligonucleotide
  source 1..19: mol_type = other RNA
ggaacttgtggctccaagc

SEQ ID NO: 4247 - RNA, 19 nt, synthetic construct
  misc_feature 1..19: note = Description of Artificial Sequence: Synthetic oligonucleotide
  source 1..19: mol_type = other RNA
gggaacttgtggctccaag

SEQ ID NO: 4248 - RNA, 19 nt, synthetic construct
  misc_feature 1..19: note = Description of Artificial Sequence: Synthetic oligonucleotide
  source 1..19: mol_type = other RNA
tgggaacttgtggctccaa

SEQ ID NO: 4249 - RNA, 19 nt, synthetic construct
  misc_feature 1..19: note = Description of Artificial Sequence: Synthetic oligonucleotide
  source 1..19: mol_type = other RNA
ttgggaacttgtggctcca

SEQ ID NO: 4250 - RNA, 19 nt, synthetic construct
  misc_feature 1..19: note = Description of Artificial Sequence: Synthetic oligonucleotide
  source 1..19: mol_type = other RNA
tttgggaacttgtggctcc

SEQ ID NO: 4251 - RNA, 19 nt, synthetic construct
  misc_feature 1..19: note = Description of Artificial Sequence: Synthetic oligonucleotide
  source 1..19: mol_type = other RNA
atttgggaacttgtggctc

SEQ ID NO: 4252 - RNA, 19 nt, synthetic construct
  misc_feature 1..19: note = Description of Artificial Sequence: Synthetic oligonucleotide
  source 1..19: mol_type = other RNA
catttgggaacttgtggct

SEQ ID NO: 4253 - RNA, 19 nt, synthetic construct
  misc_feature 1..19: note = Description of Artificial Sequence: Synthetic oligonucleotide
  source 1..19: mol_type = other RNA
tcatttgggaacttgtggc

SEQ ID NO: 4254 - RNA, 19 nt, synthetic construct
  misc_feature 1..19: note = Description of Artificial Sequence: Synthetic oligonucleotide
  source 1..19: mol_type = other RNA
atcatttgggaacttgtgg

SEQ ID NO: 4255 - RNA, 19 nt, synthetic construct
  misc_feature 1..19: note = Description of Artificial Sequence: Synthetic oligonucleotide
  source 1..19: mol_type = other RNA
gatcatttgggaacttgtg

SEQ ID NO: 4256 - RNA, 19 nt, synthetic construct
  misc_feature 1..19: note = Description of Artificial Sequence: Synthetic oligonucleotide
  source 1..19: mol_type = other RNA
tgatcatttgggaacttgt

SEQ ID NO: 4257 - RNA, 19 nt, synthetic construct
  misc_feature 1..19: note = Description of Artificial Sequence: Synthetic oligonucleotide
  source 1..19: mol_type = other RNA
gtgatcatttgggaacttg

SEQ ID NO: 4258 - RNA, 19 nt, synthetic construct
  misc_feature 1..19: note = Description of Artificial Sequence: Synthetic oligonucleotide
  source 1..19: mol_type = other RNA
tgtgatcatttgggaactt

SEQ ID NO: 4259 - RNA, 19 nt, synthetic construct
  misc_feature 1..19: note = Description of Artificial Sequence: Synthetic oligonucleotide
  source 1..19: mol_type = other RNA
ttgtgatcatttgggaact

SEQ ID NO: 4260 - RNA, 19 nt, synthetic construct
  misc_feature 1..19: note = Description of Artificial Sequence: Synthetic oligonucleotide
  source 1..19: mol_type = other RNA
cttgtgatcatttgggaac

SEQ ID NO: 4261 - RNA, 19 nt, synthetic construct
  misc_feature 1..19: note = Description of Artificial Sequence: Synthetic oligonucleotide
  source 1..19: mol_type = other RNA
acttgtgatcatttgggaa

SEQ ID NO: 4262 - RNA, 19 nt, synthetic construct
  misc_feature 1..19: note = Description of Artificial Sequence: Synthetic oligonucleotide
  source 1..19: mol_type = other RNA
tacttgtgatcatttggga

SEQ ID NO: 4263 - RNA, 19 nt, synthetic construct
  misc_feature 1..19: note = Description of Artificial Sequence: Synthetic oligonucleotide
  source 1..19: mol_type = other RNA
gtacttgtgatcatttggg

SEQ ID NO: 4264 - RNA, 19 nt, synthetic construct
  misc_feature 1..19: note = Description of Artificial Sequence: Synthetic oligonucleotide
  source 1..19: mol_type = other RNA
tgtacttgtgatcatttgg

SEQ ID NO: 4265 - RNA, 19 nt, synthetic construct
  misc_feature 1..19: note = Description of Artificial Sequence: Synthetic oligonucleotide
  source 1..19: mol_type = other RNA
gtgtacttgtgatcatttg

SEQ ID NO: 4266 - RNA, 19 nt, synthetic construct
  misc_feature 1..19: note = Description of Artificial Sequence: Synthetic oligonucleotide
  source 1..19: mol_type = other RNA
cgtgtacttgtgatcattt

SEQ ID NO: 4267 - RNA, 19 nt, synthetic construct
  misc_feature 1..19: note = Description of Artificial Sequence: Synthetic oligonucleotide
  source 1..19: mol_type = other RNA
gcgtgtacttgtgatcatt

SEQ ID NO: 4268 - RNA, 19 nt, synthetic construct
  misc_feature 1..19: note = Description of Artificial Sequence: Synthetic oligonucleotide
  source 1..19: mol_type = other RNA
ggcgtgtacttgtgatcat

SEQ ID NO: 4269 - RNA, 19 nt, synthetic construct
  misc_feature 1..19: note = Description of Artificial Sequence: Synthetic oligonucleotide
  source 1..19: mol_type = other RNA
gggcgtgtacttgtgatca

SEQ ID NO: 4270 - RNA, 19 nt, synthetic construct
  misc_feature 1..19: note = Description of Artificial Sequence: Synthetic oligonucleotide
  source 1..19: mol_type = other RNA
tgggcgtgtacttgtgatc

SEQ ID NO: 4271 - RNA, 19 nt, synthetic construct
  misc_feature 1..19: note = Description of Artificial Sequence: Synthetic oligonucleotide
  source 1..19: mol_type = other RNA
gtgggcgtgtacttgtgat

SEQ ID NO: 4272 - RNA, 19 nt, synthetic construct
  misc_feature 1..19: note = Description of Artificial Sequence: Synthetic oligonucleotide
  source 1..19: mol_type = other RNA
agtgggcgtgtacttgtga

SEQ ID NO: 4273 - RNA, 19 nt, synthetic construct
  misc_feature 1..19: note = Description of Artificial Sequence: Synthetic oligonucleotide
  source 1..19: mol_type = other RNA
gagtgggcgtgtacttgtg

SEQ ID NO: 4274 - RNA, 19 nt, synthetic construct
  misc_feature 1..19: note = Description of Artificial Sequence: Synthetic oligonucleotide
  source 1..19: mol_type = other RNA
agagtgggcgtgtacttgt

SEQ ID NO: 4275 - RNA, 19 nt, synthetic construct
  misc_feature 1..19: note = Description of Artificial Sequence: Synthetic oligonucleotide
  source 1..19: mol_type = other RNA
gagagtgggcgtgtacttg

SEQ ID NO: 4276 - RNA, 19 nt, synthetic construct
  misc_feature 1..19: note = Description of Artificial Sequence: Synthetic oligonucleotide
  source 1..19: mol_type = other RNA
ggagagtgggcgtgtactt

SEQ ID NO: 4277 - RNA, 19 nt, synthetic construct
  misc_feature 1..19: note = Description of Artificial Sequence: Synthetic oligonucleotide
  source 1..19: mol_type = other RNA
cggagagtgggcgtgtact

SEQ ID NO: 4278 - RNA, 19 nt, synthetic construct
  misc_feature 1..19: note = Description of Artificial Sequence: Synthetic oligonucleotide
  source 1..19: mol_type = other RNA
ccggagagtgggcgtgtac

SEQ ID NO: 4279 - RNA, 19 nt, synthetic construct
  misc_feature 1..19: note = Description of Artificial Sequence: Synthetic oligonucleotide
  source 1..19: mol_type = other RNA
tccggagagtgggcgtgta

SEQ ID NO: 4280 - RNA, 19 nt, synthetic construct
  misc_feature 1..19: note = Description of Artificial Sequence: Synthetic oligonucleotide
  source 1..19: mol_type = other RNA
ttccggagagtgggcgtgt

SEQ ID NO: 4281 - RNA, 19 nt, synthetic construct
  misc_feature 1..19: note = Description of Artificial Sequence: Synthetic oligonucleotide
  source 1..19: mol_type = other RNA
attccggagagtgggcgtg

SEQ ID NO: 4282 - RNA, 19 nt, synthetic construct
  misc_feature 1..19: note = Description of Artificial Sequence: Synthetic oligonucleotide
  source 1..19: mol_type = other RNA
cattccggagagtgggcgt

SEQ ID NO: 4283 - RNA, 19 nt, synthetic construct
  misc_feature 1..19: note = Description of Artificial Sequence: Synthetic oligonucleotide
  source 1..19: mol_type = other RNA
ccattccggagagtgggcg

SEQ ID NO: 4284 - RNA, 19 nt, synthetic construct
  misc_feature 1..19: note = Description of Artificial Sequence: Synthetic oligonucleotide
  source 1..19: mol_type = other RNA
gccattccggagagtgggc

SEQ ID NO: 4285 - RNA, 19 nt, synthetic construct
  misc_feature 1..19: note = Description of Artificial Sequence: Synthetic oligonucleotide
  source 1..19: mol_type = other RNA
ggccattccggagagtggg

SEQ ID NO: 4286 - RNA, 19 nt, synthetic construct
  misc_feature 1..19: note = Description of Artificial Sequence: Synthetic oligonucleotide
  source 1..19: mol_type = other RNA
aggccattccggagagtgg

SEQ ID NO: 4287 - RNA, 19 nt, synthetic construct
  misc_feature 1..19: note = Description of Artificial Sequence: Synthetic oligonucleotide
  source 1..19: mol_type = other RNA
caggccattccggagagtg

SEQ ID NO: 4288 - RNA, 19 nt, synthetic construct
  misc_feature 1..19: note = Description of Artificial Sequence: Synthetic oligonucleotide
  source 1..19: mol_type = other RNA
ccaggccattccggagagt

SEQ ID NO: 4289 - RNA, 19 nt, synthetic construct
  misc_feature 1..19: note = Description of Artificial Sequence: Synthetic oligonucleotide
  source 1..19: mol_type = other RNA
tccaggccattccggagag

SEQ ID NO: 4290 - RNA, 19 nt, synthetic construct
  misc_feature 1..19: note = Description of Artificial Sequence: Synthetic oligonucleotide
  source 1..19: mol_type = other RNA
ttccaggccattccggaga

SEQ ID NO: 4291 - RNA, 19 nt, synthetic construct
  misc_feature 1..19: note = Description of Artificial Sequence: Synthetic oligonucleotide
  source 1..19: mol_type = other RNA
cttccaggccattccggag

SEQ ID NO: 4292 - RNA, 19 nt, synthetic construct
  misc_feature 1..19: note = Description of Artificial Sequence: Synthetic oligonucleotide
  source 1..19: mol_type = other RNA
tcttccaggccattccgga

SEQ ID NO: 4293 - RNA, 19 nt, synthetic construct
  misc_feature 1..19: note = Description of Artificial Sequence: Synthetic oligonucleotide
  source 1..19: mol_type = other RNA
ctcttccaggccattccgg

SEQ ID NO: 4294 - RNA, 19 nt, synthetic construct
  misc_feature 1..19: note = Description of Artificial Sequence: Synthetic oligonucleotide
  source 1..19: mol_type = other RNA
tctcttccaggccattccg

SEQ ID NO: 4295 - RNA, 19 nt, synthetic construct
  misc_feature 1..19: note = Description of Artificial Sequence: Synthetic oligonucleotide
  source 1..19: mol_type = other RNA
ttctcttccaggccattcc

SEQ ID NO: 4296 - RNA, 19 nt, synthetic construct
  misc_feature 1..19: note = Description of Artificial Sequence: Synthetic oligonucleotide
  source 1..19: mol_type = other RNA
gttctcttccaggccattc

SEQ ID NO: 4297 - RNA, 19 nt, synthetic construct
  misc_feature 1..19: note = Description of Artificial Sequence: Synthetic oligonucleotide
  source 1..19: mol_type = other RNA
agttctcttccaggccatt

SEQ ID NO: 4298 - RNA, 19 nt, synthetic construct
  misc_feature 1..19: note = Description of Artificial Sequence: Synthetic oligonucleotide
  source 1..19: mol_type = other RNA
aagttctcttccaggccat

SEQ ID NO: 4299 - RNA, 19 nt, synthetic construct
  misc_feature 1..19: note = Description of Artificial Sequence: Synthetic oligonucleotide
  source 1..19: mol_type = other RNA
gaagttctcttccaggcca

SEQ ID NO: 4300 - RNA, 19 nt, synthetic construct
  misc_feature 1..19: note = Description of Artificial Sequence: Synthetic oligonucleotide
  source 1..19: mol_type = other RNA
agaagttctcttccaggcc

SEQ ID NO: 4301 - RNA, 19 nt, synthetic construct
  misc_feature 1..19: note = Description of Artificial Sequence: Synthetic oligonucleotide
  source 1..19: mol_type = other RNA
cagaagttctcttccaggc

SEQ ID NO: 4302 - RNA, 19 nt, synthetic construct
  misc_feature 1..19: note = Description of Artificial Sequence: Synthetic oligonucleotide
  source 1..19: mol_type = other RNA
gcagaagttctcttccagg

SEQ ID NO: 4303 - RNA, 19 nt, synthetic construct
  misc_feature 1..19: note = Description of Artificial Sequence: Synthetic oligonucleotide
  source 1..19: mol_type = other RNA
ggcagaagttctcttccag

SEQ ID NO: 4304 - RNA, 19 nt, synthetic construct
  misc_feature 1..19: note = Description of Artificial Sequence: Synthetic oligonucleotide
  source 1..19: mol_type = other RNA
cggcagaagttctcttcca

SEQ ID NO: 4305 - RNA, 19 nt, synthetic construct
  misc_feature 1..19: note = Description of Artificial Sequence: Synthetic oligonucleotide
  source 1..19: mol_type = other RNA
acggcagaagttctcttcc

SEQ ID NO: 4306 - RNA, 19 nt, synthetic construct
  misc_feature 1..19: note = Description of Artificial Sequence: Synthetic oligonucleotide
  source 1..19: mol_type = other RNA
tacggcagaagttctcttc

SEQ ID NO: 4307 - RNA, 19 nt, synthetic construct
  misc_feature 1..19: note = Description of Artificial Sequence: Synthetic oligonucleotide
  source 1..19: mol_type = other RNA
ttacggcagaagttctctt

SEQ ID NO: 4308 - RNA, 19 nt, synthetic construct
  misc_feature 1..19: note = Description of Artificial Sequence: Synthetic oligonucleotide
  source 1..19: mol_type = other RNA
gttacggcagaagttctct

SEQ ID NO: 4309 - RNA, 19 nt, synthetic construct
  misc_feature 1..19: note = Description of Artificial Sequence: Synthetic oligonucleotide
  source 1..19: mol_type = other RNA
ggttacggcagaagttctc

SEQ ID NO: 4310 - RNA, 19 nt, synthetic construct
  misc_feature 1..19: note = Description of Artificial Sequence: Synthetic oligonucleotide
  source 1..19: mol_type = other RNA
gggttacggcagaagttct

SEQ ID NO: 4311 - RNA, 19 nt, synthetic construct
  misc_feature 1..19: note = Description of Artificial Sequence: Synthetic oligonucleotide
  source 1..19: mol_type = other RNA
agggttacggcagaagttc

SEQ ID NO: 4312 - RNA, 19 nt, synthetic construct
  misc_feature 1..19: note = Description of Artificial Sequence: Synthetic oligonucleotide
  source 1..19: mol_type = other RNA
cagggttacggcagaagtt

SEQ ID NO: 4313 - RNA, 19 nt, synthetic construct
  misc_feature 1..19: note = Description of Artificial Sequence: Synthetic oligonucleotide
  source 1..19: mol_type = other RNA
tcagggttacggcagaagt

SEQ ID NO: 4314 - RNA, 19 nt, synthetic construct
  misc_feature 1..19: note = Description of Artificial Sequence: Synthetic oligonucleotide
  source 1..19: mol_type = other RNA
atcagggttacggcagaag

SEQ ID NO: 4315 - RNA, 19 nt, synthetic construct
  misc_feature 1..19: note = Description of Artificial Sequence: Synthetic oligonucleotide
  source 1..19: mol_type = other RNA
catcagggttacggcagaa

SEQ ID NO: 4316 - RNA, 19 nt, synthetic construct
  misc_feature 1..19: note = Description of Artificial Sequence: Synthetic oligonucleotide
  source 1..19: mol_type = other RNA
ccatcagggttacggcaga

SEQ ID NO: 4317 - RNA, 19 nt, synthetic construct
  misc_feature 1..19: note = Description of Artificial Sequence: Synthetic oligonucleotide
  source 1..19: mol_type = other RNA
gccatcagggttacggcag

SEQ ID NO: 4318 - RNA, 19 nt, synthetic construct
  misc_feature 1..19: note = Description of Artificial Sequence: Synthetic oligonucleotide
  source 1..19: mol_type = other RNA
cgccatcagggttacggca

SEQ ID NO: 4319 - RNA, 19 nt, synthetic construct
  misc_feature 1..19: note = Description of Artificial Sequence: Synthetic oligonucleotide
  source 1..19: mol_type = other RNA
tcgccatcagggttacggc

SEQ ID NO: 4320 - RNA, 19 nt, synthetic construct
  misc_feature 1..19: note = Description of Artificial Sequence: Synthetic oligonucleotide
  source 1..19: mol_type = other RNA
gtcgccatcagggttacgg

SEQ ID NO: 4321 - RNA, 19 nt, synthetic construct
  misc_feature 1..19: note = Description of Artificial Sequence: Synthetic oligonucleotide
  source 1..19: mol_type = other RNA
ggtcgccatcagggttacg

SEQ ID NO: 4322 - RNA, 19 nt, synthetic construct
  misc_feature 1..19: note = Description of Artificial Sequence: Synthetic oligonucleotide
  source 1..19: mol_type = other RNA
gggtcgccatcagggttac

SEQ ID NO: 4323 - RNA, 19 nt, synthetic construct
  misc_feature 1..19: note = Description of Artificial Sequence: Synthetic oligonucleotide
  source 1..19: mol_type = other RNA
ggggtcgccatcagggtta

SEQ ID NO: 4324 - RNA, 19 nt, synthetic construct
  misc_feature 1..19: note = Description of Artificial Sequence: Synthetic oligonucleotide
  source 1..19: mol_type = other RNA
cggggtcgccatcagggtt

SEQ ID NO: 4325 - RNA, 19 nt, synthetic construct
  misc_feature 1..19: note = Description of Artificial Sequence: Synthetic oligonucleotide
  source 1..19: mol_type = other RNA
ccggggtcgccatcagggt

SEQ ID NO: 4326 - RNA, 19 nt, synthetic construct
  misc_feature 1..19: note = Description of Artificial Sequence: Synthetic oligonucleotide
  source 1..19: mol_type = other RNA
tccggggtcgccatcaggg

SEQ ID NO: 4327 - RNA, 19 nt, synthetic construct
  misc_feature 1..19: note = Description of Artificial Sequence: Synthetic oligonucleotide
  source 1..19: mol_type = other RNA
ctccggggtcgccatcagg

SEQ ID NO: 4328 - RNA, 19 nt, synthetic construct
  misc_feature 1..19: note = Description of Artificial Sequence: Synthetic oligonucleotide
  source 1..19: mol_type = other RNA
cctccggggtcgccatcag

SEQ ID NO: 4329 - RNA, 19 nt, synthetic construct
  misc_feature 1..19: note = Description of Artificial Sequence: Synthetic oligonucleotide
  source 1..19: mol_type = other RNA
acctccggggtcgccatca

SEQ ID NO: 4330 - RNA, 19 nt, synthetic construct
  misc_feature 1..19: note = Description of Artificial Sequence: Synthetic oligonucleotide
  source 1..19: mol_type = other RNA
gacctccggggtcgccatc

SEQ ID NO: 4331 - RNA, 19 nt, synthetic construct
  misc_feature 1..19: note = Description of Artificial Sequence: Synthetic oligonucleotide
  source 1..19: mol_type = other RNA
ggacctccggggtcgccat

SEQ ID NO: 4332 - RNA, 19 nt, synthetic construct
  misc_feature 1..19: note = Description of Artificial Sequence: Synthetic oligonucleotide
  source 1..19: mol_type = other RNA
aggacctccggggtcgcca

SEQ ID NO: 4333 - RNA, 19 nt, synthetic construct
  misc_feature 1..19: note = Description of Artificial Sequence: Synthetic oligonucleotide
  source 1..19: mol_type = other RNA
aaggacctccggggtcgcc

SEQ ID NO: 4334 - RNA, 19 nt, synthetic construct
  misc_feature 1..19: note = Description of Artificial Sequence: Synthetic oligonucleotide
  source 1..19: mol_type = other RNA
caaggacctccggggtcgc

SEQ ID NO: 4335 - RNA, 19 nt, synthetic construct
  misc_feature 1..19: note = Description of Artificial Sequence: Synthetic oligonucleotide
  source 1..19: mol_type = other RNA
ccaaggacctccggggtcg

SEQ ID NO: 4336 - RNA, 19 nt, synthetic construct
  misc_feature 1..19: note = Description of Artificial Sequence: Synthetic oligonucleotide
  source 1..19: mol_type = other RNA
accaaggacctccggggtc

SEQ ID NO: 4337 - RNA, 19 nt, synthetic construct
  misc_feature 1..19: note = Description of Artificial Sequence: Synthetic oligonucleotide
  source 1..19: mol_type = other RNA
caccaaggacctccggggt

SEQ ID NO: 4338 - RNA, 19 nt, synthetic construct
  misc_feature 1..19: note = Description of Artificial Sequence: Synthetic oligonucleotide
  source 1..19: mol_type = other RNA
gcaccaaggacctccgggg

SEQ ID NO: 4339 - RNA, 19 nt, synthetic construct
  misc_feature 1..19: note = Description of Artificial Sequence: Synthetic oligonucleotide
  source 1..19: mol_type = other RNA
agcaccaaggacctccggg

SEQ ID NO: 4340 - RNA, 19 nt, synthetic construct
  misc_feature 1..19: note = Description of Artificial Sequence: Synthetic oligonucleotide
  source 1..19: mol_type = other RNA
tagcaccaaggacctccgg

SEQ ID NO: 4341 - RNA, 19 nt, synthetic construct
  misc_feature 1..19: note = Description of Artificial Sequence: Synthetic oligonucleotide
  source 1..19: mol_type = other RNA
gtagcaccaaggacctccg

SEQ ID NO: 4342 - RNA, 19 nt, synthetic construct
  misc_feature 1..19: note = Description of Artificial Sequence: Synthetic oligonucleotide
  source 1..19: mol_type = other RNA
tgtagcaccaaggacctcc

SEQ ID NO: 4343 - RNA, 19 nt, synthetic construct
  misc_feature 1..19: note = Description of Artificial Sequence: Synthetic oligonucleotide
  source 1..19: mol_type = other RNA
gtgtagcaccaaggacctc

SEQ ID NO: 4344 - RNA, 19 nt, synthetic construct
  misc_feature 1..19: note = Description of Artificial Sequence: Synthetic oligonucleotide
  source 1..19: mol_type = other RNA
tgtgtagcaccaaggacct

SEQ ID NO: 4345 - RNA, 19 nt, synthetic construct
  misc_feature 1..19: note = Description of Artificial Sequence: Synthetic oligonucleotide
  source 1..19: mol_type = other RNA
ttgtgtagcaccaaggacc

SEQ ID NO: 4346 - RNA, 19 nt, synthetic construct
  misc_feature 1..19: note = Description of Artificial Sequence: Synthetic oligonucleotide
  source 1..19: mol_type = other RNA
gttgtgtagcaccaaggac

SEQ ID NO: 4347 - RNA, 19 nt, synthetic construct
  misc_feature 1..19: note = Description of Artificial Sequence: Synthetic oligonucleotide
  source 1..19: mol_type = other RNA
tgttgtgtagcaccaagga

SEQ ID NO: 4348 - RNA, 19 nt, synthetic construct
  misc_feature 1..19: note = Description of Artificial Sequence: Synthetic oligonucleotide
  source 1..19: mol_type = other RNA
ctgttgtgtagcaccaagg

SEQ ID NO: 4349 - RNA, 19 nt, synthetic construct
  misc_feature 1..19: note = Description of Artificial Sequence: Synthetic oligonucleotide
  source 1..19: mol_type = other RNA
tctgttgtgtagcaccaag

SEQ ID NO: 4350 - RNA, 19 nt, synthetic construct
  misc_feature 1..19: note = Description of Artificial Sequence: Synthetic oligonucleotide
  source 1..19: mol_type = other RNA
gtctgttgtgtagcaccaa

SEQ ID NO: 4351 - RNA, 19 nt, synthetic construct
  misc_feature 1..19: note = Description of Artificial Sequence: Synthetic oligonucleotide
  source 1..19: mol_type = other RNA
ggtctgttgtgtagcacca

SEQ ID NO: 4352 - RNA, 19 nt, synthetic construct
  misc_feature 1..19: note = Description of Artificial Sequence: Synthetic oligonucleotide
  source 1..19: mol_type = other RNA
gggtctgttgtgtagcacc

SEQ ID NO: 4353 - RNA, 19 nt, synthetic construct
  misc_feature 1..19: note = Description of Artificial Sequence: Synthetic oligonucleotide
  source 1..19: mol_type = other RNA
agggtctgttgtgtagcac

SEQ ID NO: 4354 - RNA, 19 nt, synthetic construct
  misc_feature 1..19: note = Description of Artificial Sequence: Synthetic oligonucleotide
  source 1..19: mol_type = other RNA
cagggtctgttgtgtagca

SEQ ID NO: 4355 - RNA, 19 nt, synthetic construct
  misc_feature 1..19: note = Description of Artificial Sequence: Synthetic oligonucleotide
  source 1..19: mol_type = other RNA
gcagggtctgttgtgtagc

SEQ ID NO: 4356 - RNA, 19 nt, synthetic construct
  misc_feature 1..19: note = Description of Artificial Sequence: Synthetic oligonucleotide
  source 1..19: mol_type = other RNA
agcagggtctgttgtgtag

SEQ ID NO: 4357 - RNA, 19 nt, synthetic construct
  misc_feature 1..19: note = Description of Artificial Sequence: Synthetic oligonucleotide
  source 1..19: mol_type = other RNA
cagcagggtctgttgtgta

SEQ ID NO: 4358 - RNA, 19 nt, synthetic construct
  misc_feature 1..19: note = Description of Artificial Sequence: Synthetic oligonucleotide
  source 1..19: mol_type = other RNA
acagcagggtctgttgtgt

SEQ ID NO: 4359 - RNA, 19 nt, synthetic construct
  misc_feature 1..19: note = Description of Artificial Sequence: Synthetic oligonucleotide
  source 1..19: mol_type = other RNA
cacagcagggtctgttgtg

SEQ ID NO: 4360 - RNA, 19 nt, synthetic construct
  misc_feature 1..19: note = Description of Artificial Sequence: Synthetic oligonucleotide
  source 1..19: mol_type = other RNA
gcacagcagggtctgttgt

SEQ ID NO: 4361 - RNA, 19 nt, synthetic construct
  misc_feature 1..19: note = Description of Artificial Sequence: Synthetic oligonucleotide
  source 1..19: mol_type = other RNA
cgcacagcagggtctgttg

SEQ ID NO: 4362 - RNA, 19 nt, synthetic construct
  misc_feature 1..19: note = Description of Artificial Sequence: Synthetic oligonucleotide
  source 1..19: mol_type = other RNA
gcgcacagcagggtctgtt

SEQ ID NO: 4363 - RNA, 19 nt, synthetic construct
  misc_feature 1..19: note = Description of Artificial Sequence: Synthetic oligonucleotide
  source 1..19: mol_type = other RNA
agcgcacagcagggtctgt

SEQ ID NO: 4364 - RNA, 19 nt, synthetic construct
  misc_feature 1..19: note = Description of Artificial Sequence: Synthetic oligonucleotide
  source 1..19: mol_type = other RNA
aagcgcacagcagggtctg

SEQ ID NO: 4365 - RNA, 19 nt, synthetic construct
  misc_feature 1..19: note = Description of Artificial Sequence: Synthetic oligonucleotide
  source 1..19: mol_type = other RNA
gaagcgcacagcagggtct

SEQ ID NO: 4366 - RNA, 19 nt, synthetic construct
  misc_feature 1..19: note = Description of Artificial Sequence: Synthetic oligonucleotide
  source 1..19: mol_type = other RNA
ggaagcgcacagcagggtc

SEQ ID NO: 4367 - RNA, 19 nt, synthetic construct
  misc_feature 1..19: note = Description of Artificial Sequence: Synthetic oligonucleotide
  source 1..19: mol_type = other RNA
tggaagcgcacagcagggt

SEQ ID NO: 4368 - RNA, 19 nt, synthetic construct
  misc_feature 1..19: note = Description of Artificial Sequence: Synthetic oligonucleotide
  source 1..19: mol_type = other RNA
ctggaagcgcacagcaggg

SEQ ID NO: 4369 - RNA, 19 nt, synthetic construct
  misc_feature 1..19: note = Description of Artificial Sequence: Synthetic oligonucleotide
  source 1..19: mol_type = other RNA
tctggaagcgcacagcagg

SEQ ID NO: 4370 - RNA, 19 nt, synthetic construct
  misc_feature 1..19: note = Description of Artificial Sequence: Synthetic oligonucleotide
  source 1..19: mol_type = other RNA
ctctggaagcgcacagcag

SEQ ID NO: 4371 - RNA, 19 nt, synthetic construct
  misc_feature 1..19: note = Description of Artificial Sequence: Synthetic oligonucleotide
  source 1..19: mol_type = other RNA
gctctggaagcgcacagca

SEQ ID NO: 4372 - RNA, 19 nt, synthetic construct
  misc_feature 1..19: note = Description of Artificial Sequence: Synthetic oligonucleotide
  source 1..19: mol_type = other RNA
agctctggaagcgcacagc

SEQ ID NO: 4373 - RNA, 19 nt, synthetic construct
  misc_feature 1..19: note = Description of Artificial Sequence: Synthetic oligonucleotide
  source 1..19: mol_type = other RNA
cagctctggaagcgcacag

SEQ ID NO: 4374 - RNA, 19 nt, synthetic construct
  misc_feature 1..19: note = Description of Artificial Sequence: Synthetic oligonucleotide
  source 1..19: mol_type = other RNA
gcagctctggaagcgcaca

SEQ ID NO: 4375 - RNA, 19 nt, synthetic construct
  misc_feature 1..19: note = Description of Artificial Sequence: Synthetic oligonucleotide
  source 1..19: mol_type = other RNA
cgcagctctggaagcgcac

SEQ ID NO: 4376 - RNA, 19 nt, synthetic construct
  misc_feature 1..19: note = Description of Artificial Sequence: Synthetic oligonucleotide
  source 1..19: mol_type = other RNA
ccgcagctctggaagcgca

SEQ ID NO: 4377 - RNA, 19 nt, synthetic construct
  misc_feature 1..19: note = Description of Artificial Sequence: Synthetic oligonucleotide
  source 1..19: mol_type = other RNA
gccgcagctctggaagcgc

SEQ ID NO: 4378 - RNA, 19 nt, synthetic construct
  misc_feature 1..19: note = Description of Artificial Sequence: Synthetic oligonucleotide
  source 1..19: mol_type = other RNA
tgccgcagctctggaagcg

SEQ ID NO: 4379 - RNA, 19 nt, synthetic construct
  misc_feature 1..19: note = Description of Artificial Sequence: Synthetic oligonucleotide
  source 1..19: mol_type = other RNA
atgccgcagctctggaagc

SEQ ID NO: 4380 - RNA, 19 nt, synthetic construct
  misc_feature 1..19: note = Description of Artificial Sequence: Synthetic oligonucleotide
  source 1..19: mol_type = other RNA
gatgccgcagctctggaag

SEQ ID NO: 4381 - RNA, 19 nt, synthetic construct
  misc_feature 1..19: note = Description of Artificial Sequence: Synthetic oligonucleotide
  source 1..19: mol_type = other RNA
tgatgccgcagctctggaa

SEQ ID NO: 4382 - RNA, 19 nt, synthetic construct
  misc_feature 1..19: note = Description of Artificial Sequence: Synthetic oligonucleotide
  source 1..19: mol_type = other RNA
ttgatgccgcagctctgga

SEQ ID NO: 4383 - RNA, 19 nt, synthetic construct
  misc_feature 1..19: note = Description of Artificial Sequence: Synthetic oligonucleotide
  source 1..19: mol_type = other RNA
tttgatgccgcagctctgg

SEQ ID NO: 4384 - RNA, 19 nt, synthetic construct
  misc_feature 1..19: note = Description of Artificial Sequence: Synthetic oligonucleotide
  source 1..19: mol_type = other RNA
atttgatgccgcagctctg

SEQ ID NO: 4385 - RNA, 19 nt, synthetic construct
  misc_feature 1..19: note = Description of Artificial Sequence: Synthetic oligonucleotide
  source 1..19: mol_type = other RNA
gatttgatgccgcagctct

SEQ ID NO: 4386 - RNA, 19 nt, synthetic construct
  misc_feature 1..19: note = Description of Artificial Sequence: Synthetic oligonucleotide
  source 1..19: mol_type = other RNA
ggatttgatgccgcagctc

SEQ ID NO: 4387 - RNA, 19 nt, synthetic construct
  misc_feature 1..19: note = Description of Artificial Sequence: Synthetic oligonucleotide
  source 1..19: mol_type = other RNA
aggatttgatgccgcagct

SEQ ID NO: 4388 - RNA, 19 nt, synthetic construct
  misc_feature 1..19: note = Description of Artificial Sequence: Synthetic oligonucleotide
  source 1..19: mol_type = other RNA
caggatttgatgccgcagc

SEQ ID NO: 4389 - RNA, 19 nt, synthetic construct
  misc_feature 1..19: note = Description of Artificial Sequence: Synthetic oligonucleotide
  source 1..19: mol_type = other RNA
gcaggatttgatgccgcag

SEQ ID NO: 4390 - RNA, 19 nt, synthetic construct
  misc_feature 1..19: note = Description of Artificial Sequence: Synthetic oligonucleotide
  source 1..19: mol_type = other RNA
ggcaggatttgatgccgca

SEQ ID NO: 4391 - RNA, 19 nt, synthetic construct
  misc_feature 1..19: note = Description of Artificial Sequence: Synthetic oligonucleotide
  source 1..19: mol_type = other RNA
cggcaggatttgatgccgc

SEQ ID NO: 4392 - RNA, 19 nt, synthetic construct
  misc_feature 1..19: note = Description of Artificial Sequence: Synthetic oligonucleotide
  source 1..19: mol_type = other RNA
ccggcaggatttgatgccg

SEQ ID NO: 4393 - RNA, 19 nt, synthetic construct
  misc_feature 1..19: note = Description of Artificial Sequence: Synthetic oligonucleotide
  source 1..19: mol_type = other RNA
cccggcaggatttgatgcc

SEQ ID NO: 4394 - RNA, 19 nt, synthetic construct
  misc_feature 1..19: note = Description of Artificial Sequence: Synthetic oligonucleotide
  source 1..19: mol_type = other RNA
tcccggcaggatttgatgc

SEQ ID NO: 4395 - RNA, 19 nt, synthetic construct
  misc_feature 1..19: note = Description of Artificial Sequence: Synthetic oligonucleotide
  source 1..19: mol_type = other RNA
ctcccggcaggatttgatg

SEQ ID NO: 4396 - RNA, 19 nt, synthetic construct
  misc_feature 1..19: note = Description of Artificial Sequence: Synthetic oligonucleotide
  source 1..19: mol_type = other RNA
cctcccggcaggatttgat

SEQ ID NO: 4397 - RNA, 19 nt, synthetic construct
  misc_feature 1..19: note = Description of Artificial Sequence: Synthetic oligonucleotide
  source 1..19: mol_type = other RNA
gcctcccggcaggatttga

SEQ ID NO: 4398 - RNA, 19 nt, synthetic construct
  misc_feature 1..19: note = Description of Artificial Sequence: Synthetic oligonucleotide
  source 1..19: mol_type = other RNA
ggcctcccggcaggatttg

SEQ ID NO: 4399 - RNA, 19 nt, synthetic construct
  misc_feature 1..19: note = Description of Artificial Sequence: Synthetic oligonucleotide
  source 1..19: mol_type = other RNA
cggcctcccggcaggattt

SEQ ID NO: 4400 - RNA, 19 nt, synthetic construct
  misc_feature 1..19: note = Description of Artificial Sequence: Synthetic oligonucleotide
  source 1..19: mol_type = other RNA
gcggcctcccggcaggatt

SEQ ID NO: 4401 - RNA, 19 nt, synthetic construct
  misc_feature 1..19: note = Description of Artificial Sequence: Synthetic oligonucleotide
  source 1..19: mol_type = other RNA
cgcggcctcccggcaggat

SEQ ID NO: 4402 - RNA, 19 nt, synthetic construct
  misc_feature 1..19: note = Description of Artificial Sequence: Synthetic oligonucleotide
  source 1..19: mol_type = other RNA
acgcggcctcccggcagga

SEQ ID NO: 4403 - RNA, 19 nt, synthetic construct
  misc_feature 1..19: note = Description of Artificial Sequence: Synthetic oligonucleotide
  source 1..19: mol_type = other RNA
cacgcggcctcccggcagg

SEQ ID NO: 4404 - RNA, 19 nt, synthetic construct
  misc_feature 1..19: note = Description of Artificial Sequence: Synthetic oligonucleotide
  source 1..19: mol_type = other RNA
acacgcggcctcccggcag

SEQ ID NO: 4405 - RNA, 19 nt, synthetic construct
  misc_feature 1..19: note = Description of Artificial Sequence: Synthetic oligonucleotide
  source 1..19: mol_type = other RNA
cacacgcggcctcccggca

SEQ ID NO: 4406 - RNA, 19 nt, synthetic construct
  misc_feature 1..19: note = Description of Artificial Sequence: Synthetic oligonucleotide
  source 1..19: mol_type = other RNA
acacacgcggcctcccggc

SEQ ID NO: 4407 - RNA, 19 nt, synthetic construct
  misc_feature 1..19: note = Description of Artificial Sequence: Synthetic oligonucleotide
  source 1..19: mol_type = other RNA
gacacacgcggcctcccgg

SEQ ID NO: 4408 - RNA, 19 nt, synthetic construct
  misc_feature 1..19: note = Description of Artificial Sequence: Synthetic oligonucleotide
  source 1..19: mol_type = other RNA
agacacacgcggcctcccg

SEQ ID NO: 4409 - RNA, 19 nt, synthetic construct
  misc_feature 1..19: note = Description of Artificial Sequence: Synthetic oligonucleotide
  source 1..19: mol_type = other RNA
cagacacacgcggcctccc

SEQ ID NO: 4410 - RNA, 19 nt, synthetic construct
  misc_feature 1..19: note = Description of Artificial Sequence: Synthetic oligonucleotide
  source 1..19: mol_type = other RNA
ccagacacacgcggcctcc

SEQ ID NO: 4411 - RNA, 19 nt, synthetic construct
  misc_feature 1..19: note = Description of Artificial Sequence: Synthetic oligonucleotide
  source 1..19: mol_type = other RNA
accagacacacgcggcctc

SEQ ID NO: 4412 - RNA, 19 nt, synthetic construct
  misc_feature 1..19: note = Description of Artificial Sequence: Synthetic oligonucleotide
  source 1..19: mol_type = other RNA
caccagacacacgcggcct

SEQ ID NO: 4413 - RNA, 19 nt, synthetic construct
  misc_feature 1..19: note = Description of Artificial Sequence: Synthetic oligonucleotide
  source 1..19: mol_type = other RNA
gcaccagacacacgcggcc

SEQ ID NO: 4414 - RNA, 19 nt, synthetic construct
  misc_feature 1..19: note = Description of Artificial Sequence: Synthetic oligonucleotide
  source 1..19: mol_type = other RNA
tgcaccagacacacgcggc

SEQ ID NO: 4415 - RNA, 19 nt, synthetic construct
  misc_feature 1..19: note = Description of Artificial Sequence: Synthetic oligonucleotide
  source 1..19: mol_type = other RNA
ttgcaccagacacacgcgg

SEQ ID NO: 4416 - RNA, 19 nt, synthetic construct
  misc_feature 1..19: note = Description of Artificial Sequence: Synthetic oligonucleotide
  source 1..19: mol_type = other RNA
attgcaccagacacacgcg

SEQ ID NO: 4417 - RNA, 19 nt, synthetic construct
  misc_feature 1..19: note = Description of Artificial Sequence: Synthetic oligonucleotide
  source 1..19: mol_type = other RNA
cattgcaccagacacacgc

SEQ ID NO: 4418 - RNA, 19 nt, synthetic construct
  misc_feature 1..19: note = Description of Artificial Sequence: Synthetic oligonucleotide
  source 1..19: mol_type = other RNA
ccattgcaccagacacacg

SEQ ID NO: 4419 - RNA, 19 nt, synthetic construct
  misc_feature 1..19: note = Description of Artificial Sequence: Synthetic oligonucleotide
  source 1..19: mol_type = other RNA
gccattgcaccagacacac

SEQ ID NO: 4420 - RNA, 19 nt, synthetic construct
  misc_feature 1..19: note = Description of Artificial Sequence: Synthetic oligonucleotide
  source 1..19: mol_type = other RNA
cgccattgcaccagacaca

SEQ ID NO: 4421 - RNA, 19 nt, synthetic construct
  misc_feature 1..19: note = Description of Artificial Sequence: Synthetic oligonucleotide
  source 1..19: mol_type = other RNA
tcgccattgcaccagacac

SEQ ID NO: 4422 - RNA, 19 nt, synthetic construct
  misc_feature 1..19: note = Description of Artificial Sequence: Synthetic oligonucleotide
  source 1..19: mol_type = other RNA
ctcgccattgcaccagaca

SEQ ID NO: 4423 - RNA, 19 nt, synthetic construct
  misc_feature 1..19: note = Description of Artificial Sequence: Synthetic oligonucleotide
  source 1..19: mol_type = other RNA
cctcgccattgcaccagac

SEQ ID NO: 4424 - RNA, 19 nt, synthetic construct
  misc_feature 1..19: note = Description of Artificial Sequence: Synthetic oligonucleotide
  source 1..19: mol_type = other RNA
tcctcgccattgcaccaga

SEQ ID NO: 4425 - RNA, 19 nt, synthetic construct
  misc_feature 1..19: note = Description of Artificial Sequence: Synthetic oligonucleotide
  source 1..19: mol_type = other RNA
ttcctcgccattgcaccag

SEQ ID NO: 4426 - RNA, 19 nt, synthetic construct
  misc_feature 1..19: note = Description of Artificial Sequence: Synthetic oligonucleotide
  source 1..19: mol_type = other RNA
attcctcgccattgcacca

SEQ ID NO: 4427 - RNA, 19 nt, synthetic construct
  misc_feature 1..19: note = Description of Artificial Sequence: Synthetic oligonucleotide
  source 1..19: mol_type = other RNA
tattcctcgccattgcacc

SEQ ID NO: 4428 - RNA, 19 nt, synthetic construct
  misc_feature 1..19: note = Description of Artificial Sequence: Synthetic oligonucleotide
  source 1..19: mol_type = other RNA
gtattcctcgccattgcac

SEQ ID NO: 4429 - RNA, 19 nt, synthetic construct
  misc_feature 1..19: note = Description of Artificial Sequence: Synthetic oligonucleotide
  source 1..19: mol_type = other RNA
ggtattcctcgccattgca

SEQ ID NO: 4430 - RNA, 19 nt, synthetic construct
  misc_feature 1..19: note = Description of Artificial Sequence: Synthetic oligonucleotide
  source 1..19: mol_type = other RNA
cggtattcctcgccattgc

SEQ ID NO: 4431 - RNA, 19 nt, synthetic construct
  misc_feature 1..19: note = Description of Artificial Sequence: Synthetic oligonucleotide
  source 1..19: mol_type = other RNA
gcggtattcctcgccattg

SEQ ID NO: 4432 - RNA, 19 nt, synthetic construct
  misc_feature 1..19: note = Description of Artificial Sequence: Synthetic oligonucleotide
  source 1..19: mol_type = other RNA
cgcggtattcctcgccatt

SEQ ID NO: 4433 - RNA, 19 nt, synthetic construct
  misc_feature 1..19: note = Description of Artificial Sequence: Synthetic oligonucleotide
  source 1..19: mol_type = other RNA
ccgcggtattcctcgccat

SEQ ID NO: 4434 - RNA, 19 nt, synthetic construct
  misc_feature 1..19: note = Description of Artificial Sequence: Synthetic oligonucleotide
  source 1..19: mol_type = other RNA
gccgcggtattcctcgcca

SEQ ID NO: 4435 - RNA, 19 nt, synthetic construct
  misc_feature 1..19: note = Description of Artificial Sequence: Synthetic oligonucleotide
  source 1..19: mol_type = other RNA
cgccgcggtattcctcgcc

SEQ ID NO: 4436 - RNA, 19 nt, synthetic construct
  misc_feature 1..19: note = Description of Artificial Sequence: Synthetic oligonucleotide
  source 1..19: mol_type = other RNA
gcgccgcggtattcctcgc

SEQ ID NO: 4437 - RNA, 19 nt, synthetic construct
  misc_feature 1..19: note = Description of Artificial Sequence: Synthetic oligonucleotide
  source 1..19: mol_type = other RNA
cgcgccgcggtattcctcg

SEQ ID NO: 4438 - RNA, 19 nt, synthetic construct
  misc_feature 1..19: note = Description of Artificial Sequence: Synthetic oligonucleotide
  source 1..19: mol_type = other RNA
ccgcgccgcggtattcctc

SEQ ID NO: 4439 - RNA, 19 nt, synthetic construct
  misc_feature 1..19: note = Description of Artificial Sequence: Synthetic oligonucleotide
  source 1..19: mol_type = other RNA
accgcgccgcggtattcct

SEQ ID NO: 4440 - RNA, 19 nt, synthetic construct
  misc_feature 1..19: note = Description of Artificial Sequence: Synthetic oligonucleotide
  source 1..19: mol_type = other RNA
taccgcgccgcggtattcc

SEQ ID NO: 4441 - RNA, 19 nt, synthetic construct
  misc_feature 1..19: note = Description of Artificial Sequence: Synthetic oligonucleotide
  source 1..19: mol_type = other RNA
ctaccgcgccgcggtattc

SEQ ID NO: 4442 - RNA, 19 nt, synthetic construct
  misc_feature 1..19: note = Description of Artificial Sequence: Synthetic oligonucleotide
  source 1..19: mol_type = other RNA
tctaccgcgccgcggtatt

SEQ ID NO: 4443 - RNA, 19 nt, synthetic construct
  misc_feature 1..19: note = Description of Artificial Sequence: Synthetic oligonucleotide
  source 1..19: mol_type = other RNA
gtctaccgcgccgcggtat

SEQ ID NO: 4444 - RNA, 19 nt, synthetic construct
  misc_feature 1..19: note = Description of Artificial Sequence: Synthetic oligonucleotide
  source 1..19: mol_type = other RNA
ggtctaccgcgccgcggta

SEQ ID NO: 4445 - RNA, 19 nt, synthetic construct
  misc_feature 1..19: note = Description of Artificial Sequence: Synthetic oligonucleotide
  source 1..19: mol_type = other RNA
cggtctaccgcgccgcggt

SEQ ID NO: 4446 - RNA, 19 nt, synthetic construct
  misc_feature 1..19: note = Description of Artificial Sequence: Synthetic oligonucleotide
  source 1..19: mol_type = other RNA
gcggtctaccgcgccgcgg

SEQ ID NO: 4447 - RNA, 19 nt, synthetic construct
  misc_feature 1..19: note = Description of Artificial Sequence: Synthetic oligonucleotide
  source 1..19: mol_type = other RNA
tgcggtctaccgcgccgcg

SEQ ID NO: 4448 - RNA, 19 nt, synthetic construct
  misc_feature 1..19: note = Description of Artificial Sequence: Synthetic oligonucleotide
  source 1..19: mol_type = other RNA
gtgcggtctaccgcgccgc

SEQ ID NO: 4449 - RNA, 19 nt, synthetic construct
  misc_feature 1..19: note = Description of Artificial Sequence: Synthetic oligonucleotide
  source 1..19: mol_type = other RNA
cgtgcggtctaccgcgccg

SEQ ID NO: 4450 - RNA, 19 nt, synthetic construct
  misc_feature 1..19: note = Description of Artificial Sequence: Synthetic oligonucleotide
  source 1..19: mol_type = other RNA
ccgtgcggtctaccgcgcc

SEQ ID NO: 4451 - RNA, 19 nt, synthetic construct
  misc_feature 1..19: note = Description of Artificial Sequence: Synthetic oligonucleotide
  source 1..19: mol_type = other RNA
tccgtgcggtctaccgcgc

SEQ ID NO: 4452 - RNA, 19 nt, synthetic construct
  misc_feature 1..19: note = Description of Artificial Sequence: Synthetic oligonucleotide
  source 1..19: mol_type = other RNA
ctccgtgcggtctaccgcg

SEQ ID NO: 4453 - RNA, 19 nt, synthetic construct
  misc_feature 1..19: note = Description of Artificial Sequence: Synthetic oligonucleotide
  source 1..19: mol_type = other RNA
actccgtgcggtctaccgc

SEQ ID NO: 4454 - RNA, 19 nt, synthetic construct
  misc_feature 1..19: note = Description of Artificial Sequence: Synthetic oligonucleotide
  source 1..19: mol_type = other RNA
gactccgtgcggtctaccg

SEQ ID NO: 4455 - RNA, 19 nt, synthetic construct
  misc_feature 1..19: note = Description of Artificial Sequence: Synthetic oligonucleotide
  source 1..19: mol_type = other RNA
tgactccgtgcggtctacc

SEQ ID NO: 4456 - RNA, 19 nt, synthetic construct
  misc_feature 1..19: note = Description of Artificial Sequence: Synthetic oligonucleotide
  source 1..19: mol_type = other RNA
ctgactccgtgcggtctac

SEQ ID NO: 4457 - RNA, 19 nt, synthetic construct
  misc_feature 1..19: note = Description of Artificial Sequence: Synthetic oligonucleotide
  source 1..19: mol_type = other RNA
cctgactccgtgcggtcta

SEQ ID NO: 4458 - RNA, 19 nt, synthetic construct
  misc_feature 1..19: note = Description of Artificial Sequence: Synthetic oligonucleotide
  source 1..19: mol_type = other RNA
ccctgactccgtgcggtct

SEQ ID NO: 4459 - RNA, 19 nt, synthetic construct
  misc_feature 1..19: note = Description of Artificial Sequence: Synthetic oligonucleotide
  source 1..19: mol_type = other RNA
gccctgactccgtgcggtc

SEQ ID NO: 4460 - RNA, 19 nt, synthetic construct
  misc_feature 1..19: note = Description of Artificial Sequence: Synthetic oligonucleotide
  source 1..19: mol_type = other RNA
cgccctgactccgtgcggt

SEQ ID NO: 4461 - RNA, 19 nt, synthetic construct
  misc_feature 1..19: note = Description of Artificial Sequence: Synthetic oligonucleotide
  source 1..19: mol_type = other RNA
gcgccctgactccgtgcgg

SEQ ID NO: 4462 - RNA, 19 nt, synthetic construct
  misc_feature 1..19: note = Description of Artificial Sequence: Synthetic oligonucleotide
  source 1..19: mol_type = other RNA
cgcgccctgactccgtgcg

SEQ ID NO: 4463 - RNA, 19 nt, synthetic construct
  misc_feature 1..19: note = Description of Artificial Sequence: Synthetic oligonucleotide
  source 1..19: mol_type = other RNA
tcgcgccctgactccgtgc

SEQ ID NO: 4464 - RNA, 19 nt, synthetic construct
  misc_feature 1..19: note = Description of Artificial Sequence: Synthetic oligonucleotide
  source 1..19: mol_type = other RNA
ctcgcgccctgactccgtg

SEQ ID NO: 4465 - RNA, 19 nt, synthetic construct
  misc_feature 1..19: note = Description of Artificial Sequence: Synthetic oligonucleotide
  source 1..19: mol_type = other RNA
actcgcgccctgactccgt

SEQ ID NO: 4466 - RNA, 19 nt, synthetic construct
  misc_feature 1..19: note = Description of Artificial Sequence: Synthetic oligonucleotide
  source 1..19: mol_type = other RNA
cactcgcgccctgactccg

SEQ ID NO: 4467 - RNA, 19 nt, synthetic construct
  misc_feature 1..19: note = Description of Artificial Sequence: Synthetic oligonucleotide
  source 1..19: mol_type = other RNA
gcactcgcgccctgactcc

SEQ ID NO: 4468 - RNA, 19 nt, synthetic construct
  misc_feature 1..19: note = Description of Artificial Sequence: Synthetic oligonucleotide
  source 1..19: mol_type = other RNA
ggcactcgcgccctgactc

SEQ ID NO: 4469 - RNA, 19 nt, synthetic construct
  misc_feature 1..19: note = Description of Artificial Sequence: Synthetic oligonucleotide
  source 1..19: mol_type = other RNA
tggcactcgcgccctgact

SEQ ID NO: 4470 - RNA, 19 nt, synthetic construct
  misc_feature 1..19: note = Description of Artificial Sequence: Synthetic oligonucleotide
  source 1..19: mol_type = other RNA
ctggcactcgcgccctgac

SEQ ID NO: 4471 - RNA, 19 nt, synthetic construct
  misc_feature 1..19: note = Description of Artificial Sequence: Synthetic oligonucleotide
  source 1..19: mol_type = other RNA
gctggcactcgcgccctga

SEQ ID NO: 4472 - RNA, 19 nt, synthetic construct
  misc_feature 1..19: note = Description of Artificial Sequence: Synthetic oligonucleotide
  source 1..19: mol_type = other RNA
cgctggcactcgcgccctg

SEQ ID NO: 4473 - RNA, 19 nt, synthetic construct
  misc_feature 1..19: note = Description of Artificial Sequence: Synthetic oligonucleotide
  source 1..19: mol_type = other RNA
gcgctggcactcgcgccct

SEQ ID NO: 4474 - RNA, 19 nt, synthetic construct
  misc_feature 1..19: note = Description of Artificial Sequence: Synthetic oligonucleotide
  source 1..19: mol_type = other RNA
agcgctggcactcgcgccc

SEQ ID NO: 4475 - RNA, 19 nt, synthetic construct
  misc_feature 1..19: note = Description of Artificial Sequence: Synthetic oligonucleotide
  source 1..19: mol_type = other RNA
cagcgctggcactcgcgcc

SEQ ID NO: 4476 - RNA, 19 nt, synthetic construct
  misc_feature 1..19: note = Description of Artificial Sequence: Synthetic oligonucleotide
  source 1..19: mol_type = other RNA
ccagcgctggcactcgcgc

SEQ ID NO: 4477 - RNA, 19 nt, synthetic construct
  misc_feature 1..19: note = Description of Artificial Sequence: Synthetic oligonucleotide
  source 1..19: mol_type = other RNA
cccagcgctggcactcgcg

SEQ ID NO: 4478 - RNA, 19 nt, synthetic construct
  misc_feature 1..19: note = Description of Artificial Sequence: Synthetic oligonucleotide
  source 1..19: mol_type = other RNA
tcccagcgctggcactcgc

SEQ ID NO: 4479 - RNA, 19 nt, synthetic construct
  misc_feature 1..19: note = Description of Artificial Sequence: Synthetic oligonucleotide
  source 1..19: mol_type = other RNA
atcccagcgctggcactcg

SEQ ID NO: 4480 - RNA, 19 nt, synthetic construct
  misc_feature 1..19: note = Description of Artificial Sequence: Synthetic oligonucleotide
  source 1..19: mol_type = other RNA
gatcccagcgctggcactc

SEQ ID NO: 4481 - RNA, 19 nt, synthetic construct
  misc_feature 1..19: note = Description of Artificial Sequence: Synthetic oligonucleotide
  source 1..19: mol_type = other RNA
agatcccagcgctggcact

SEQ ID NO: 4482 - RNA, 19 nt, synthetic construct
  misc_feature 1..19: note = Description of Artificial Sequence: Synthetic oligonucleotide
  source 1..19: mol_type = other RNA
aagatcccagcgctggcac

SEQ ID NO: 4483 - RNA, 19 nt, synthetic construct
  misc_feature 1..19: note = Description of Artificial Sequence: Synthetic oligonucleotide
  source 1..19: mol_type = other RNA
gaagatcccagcgctggca

SEQ ID NO: 4484 - RNA, 19 nt, synthetic construct
  misc_feature 1..19: note = Description of Artificial Sequence: Synthetic oligonucleotide
  source 1..19: mol_type = other RNA
tgaagatcccagcgctggc

SEQ ID NO: 4485 - RNA, 19 nt, synthetic construct
  misc_feature 1..19: note = Description of Artificial Sequence: Synthetic oligonucleotide
  source 1..19: mol_type = other RNA
ctgaagatcccagcgctgg

SEQ ID NO: 4486 - RNA, 19 nt, synthetic construct
  misc_feature 1..19: note = Description of Artificial Sequence: Synthetic oligonucleotide
  source 1..19: mol_type = other RNA
gctgaagatcccagcgctg

SEQ ID NO: 4487 - RNA, 19 nt, synthetic construct
  misc_feature 1..19: note = Description of Artificial Sequence: Synthetic oligonucleotide
  source 1..19: mol_type = other RNA
tgctgaagatcccagcgct

SEQ ID NO: 4488 - RNA, 19 nt, synthetic construct
  misc_feature 1..19: note = Description of Artificial Sequence: Synthetic oligonucleotide
  source 1..19: mol_type = other RNA
gtgctgaagatcccagcgc

SEQ ID NO: 4489 - RNA, 19 nt, synthetic construct
  misc_feature 1..19: note = Description of Artificial Sequence: Synthetic oligonucleotide
  source 1..19: mol_type = other RNA
ggtgctgaagatcccagcg

SEQ ID NO: 4490 - RNA, 19 nt, synthetic construct
  misc_feature 1..19: note = Description of Artificial Sequence: Synthetic oligonucleotide
  source 1..19: mol_type = other RNA
gggtgctgaagatcccagc

SEQ ID NO: 4491 - RNA, 19 nt, synthetic construct
  misc_feature 1..19: note = Description of Artificial Sequence: Synthetic oligonucleotide
  source 1..19: mol_type = other RNA
cgggtgctgaagatcccag

SEQ ID NO: 4492 - RNA, 19 nt, synthetic construct
  misc_feature 1..19: note = Description of Artificial Sequence: Synthetic oligonucleotide
  source 1..19: mol_type = other RNA
gcgggtgctgaagatccca

SEQ ID NO: 4493 - RNA, 19 nt, synthetic construct
  misc_feature 1..19: note = Description of Artificial Sequence: Synthetic oligonucleotide
  source 1..19: mol_type = other RNA
tgcgggtgctgaagatccc

SEQ ID NO: 4494 - RNA, 19 nt, synthetic construct
  misc_feature 1..19: note = Description of Artificial Sequence: Synthetic oligonucleotide
  source 1..19: mol_type = other RNA
gtgcgggtgctgaagatcc

SEQ ID NO: 4495 - RNA, 19 nt, synthetic construct
  misc_feature 1..19: note = Description of Artificial Sequence: Synthetic oligonucleotide
  source 1..19: mol_type = other RNA
ggtgcgggtgctgaagatc

SEQ ID NO: 4496 - RNA, 19 nt, synthetic construct
  misc_feature 1..19: note = Description of Artificial Sequence: Synthetic oligonucleotide
  source 1..19: mol_type = other RNA
tggtgcgggtgctgaagat

SEQ ID NO: 4497 - RNA, 19 nt, synthetic construct
  misc_feature 1..19: note = Description of Artificial Sequence: Synthetic oligonucleotide
  source 1..19: mol_type = other RNA
ctggtgcgggtgctgaaga

SEQ ID NO: 4498 - RNA, 19 nt, synthetic construct
  misc_feature 1..19: note = Description of Artificial Sequence: Synthetic oligonucleotide
  source 1..19: mol_type = other RNA
gctggtgcgggtgctgaag

SEQ ID NO: 4499 - RNA, 19 nt, synthetic construct
  misc_feature 1..19: note = Description of Artificial Sequence: Synthetic oligonucleotide
  source 1..19: mol_type = other RNA
tgctggtgcgggtgctgaa

SEQ ID NO: 4500 - RNA, 19 nt, synthetic construct
  misc_feature 1..19: note = Description of Artificial Sequence: Synthetic oligonucleotide
  source 1..19: mol_type = other RNA
gtgctggtgcgggtgctga

SEQ ID NO: 4501 - RNA, 19 nt, synthetic construct
  misc_feature 1..19: note = Description of Artificial Sequence: Synthetic oligonucleotide
  source 1..19: mol_type = other RNA
ggtgctggtgcgggtgctg

SEQ ID NO: 4502 - RNA, 19 nt, synthetic construct
  misc_feature 1..19: note = Description of Artificial Sequence: Synthetic oligonucleotide
  source 1..19: mol_type = other RNA
gggtgctggtgcgggtgct

SEQ ID NO: 4503 - RNA, 19 nt, synthetic construct
  misc_feature 1..19: note = Description of Artificial Sequence: Synthetic oligonucleotide
  source 1..19: mol_type = other RNA
ggggtgctggtgcgggtgc

SEQ ID NO: 4504 - RNA, 19 nt, synthetic construct
  misc_feature 1..19: note = Description of Artificial Sequence: Synthetic oligonucleotide
  source 1..19: mol_type = other RNA
aggggtgctggtgcgggtg

SEQ ID NO: 4505 - RNA, 19 nt, synthetic construct
  misc_feature 1..19: note = Description of Artificial Sequence: Synthetic oligonucleotide
  source 1..19: mol_type = other RNA
aaggggtgctggtgcgggt

SEQ ID NO: 4506 - RNA, 19 nt, synthetic construct
  misc_feature 1..19: note = Description of Artificial Sequence: Synthetic oligonucleotide
  source 1..19: mol_type = other RNA
gaaggggtgctggtgcggg

SEQ ID NO: 4507 - RNA, 19 nt, synthetic construct
  misc_feature 1..19: note = Description of Artificial Sequence: Synthetic oligonucleotide
  source 1..19: mol_type = other RNA
cgaaggggtgctggtgcgg

SEQ ID NO: 4508 - RNA, 19 nt, synthetic construct
  misc_feature 1..19: note = Description of Artificial Sequence: Synthetic oligonucleotide
  source 1..19: mol_type = other RNA
tcgaaggggtgctggtgcg

SEQ ID NO: 4509 - RNA, 19 nt, synthetic construct
  misc_feature 1..19: note = Description of Artificial Sequence: Synthetic oligonucleotide
  source 1..19: mol_type = other RNA
ctcgaaggggtgctggtgc

SEQ ID NO: 4510 - RNA, 19 nt, synthetic construct
  misc_feature 1..19: note = Description of Artificial Sequence: Synthetic oligonucleotide
  source 1..19: mol_type = other RNA
gctcgaaggggtgctggtg

SEQ ID NO: 4511 - RNA, 19 nt, synthetic construct
  misc_feature 1..19: note = Description of Artificial Sequence: Synthetic oligonucleotide
  source 1..19: mol_type = other RNA
ggctcgaaggggtgctggt

SEQ ID NO: 4512 - RNA, 19 nt, synthetic construct
  misc_feature 1..19: note = Description of Artificial Sequence: Synthetic oligonucleotide
  source 1..19: mol_type = other RNA
cggctcgaaggggtgctgg

SEQ ID NO: 4513 - RNA, 19 nt, synthetic construct
  misc_feature 1..19: note = Description of Artificial Sequence: Synthetic oligonucleotide
  source 1..19: mol_type = other RNA
ccggctcgaaggggtgctg

SEQ ID NO: 4514 - RNA, 19 nt, synthetic construct
  misc_feature 1..19: note = Description of Artificial Sequence: Synthetic oligonucleotide
  source 1..19: mol_type = other RNA
cccggctcgaaggggtgct

SEQ ID NO: 4515 - RNA, 19 nt, synthetic construct
  misc_feature 1..19: note = Description of Artificial Sequence: Synthetic oligonucleotide
  source 1..19: mol_type = other RNA
gcccggctcgaaggggtgc

SEQ ID NO: 4516 - RNA, 19 nt, synthetic construct
  misc_feature 1..19: note = Description of Artificial Sequence: Synthetic oligonucleotide
  source 1..19: mol_type = other RNA
tgcccggctcgaaggggtg

SEQ ID NO: 4517 - RNA, 19 nt, synthetic construct
  misc_feature 1..19: note = Description of Artificial Sequence: Synthetic oligonucleotide
  source 1..19: mol_type = other RNA
ttgcccggctcgaaggggt

SEQ ID NO: 4518 - RNA, 19 nt, synthetic construct
  misc_feature 1..19: note = Description of Artificial Sequence: Synthetic oligonucleotide
  source 1..19: mol_type = other RNA
cttgcccggctcgaagggg

SEQ ID NO: 4519 - RNA, 19 nt, synthetic construct
  misc_feature 1..19: note = Description of Artificial Sequence: Synthetic oligonucleotide
  source 1..19: mol_type = other RNA
acttgcccggctcgaaggg

SEQ ID NO: 4520 - RNA, 19 nt, synthetic construct
  misc_feature 1..19: note = Description of Artificial Sequence: Synthetic oligonucleotide
  source 1..19: mol_type = other RNA
aacttgcccggctcgaagg

SEQ ID NO: 4521 - RNA, 19 nt, synthetic construct
  misc_feature 1..19: note = Description of Artificial Sequence: Synthetic oligonucleotide
  source 1..19: mol_type = other RNA
gaacttgcccggctcgaag

SEQ ID NO: 4522 - RNA, 19 nt, synthetic construct
  misc_feature 1..19: note = Description of Artificial Sequence: Synthetic oligonucleotide
  source 1..19: mol_type = other RNA
ggaacttgcccggctcgaa

SEQ ID NO: 4523 - RNA, 19 nt, synthetic construct
  misc_feature 1..19: note = Description of Artificial Sequence: Synthetic oligonucleotide
  source 1..19: mol_type = other RNA
aggaacttgcccggctcga

SEQ ID NO: 4524 - RNA, 19 nt, synthetic construct
  misc_feature 1..19: note = Description of Artificial Sequence: Synthetic oligonucleotide
  source 1..19: mol_type = other RNA
gaggaacttgcccggctcg

SEQ ID NO: 4525 - RNA, 19 nt, synthetic construct
  misc_feature 1..19: note = Description of Artificial Sequence: Synthetic oligonucleotide
  source 1..19: mol_type = other RNA
cgaggaacttgcccggctc

SEQ ID NO: 4526 - RNA, 19 nt, synthetic construct
  misc_feature 1..19: note = Description of Artificial Sequence: Synthetic oligonucleotide
  source 1..19: mol_type = other RNA
tcgaggaacttgcccggct

SEQ ID NO: 4527 - RNA, 19 nt, synthetic construct
  misc_feature 1..19: note = Description of Artificial Sequence: Synthetic oligonucleotide
  source 1..19: mol_type = other RNA
gtcgaggaacttgcccggc

SEQ ID NO: 4528 - RNA, 19 nt, synthetic construct
  misc_feature 1..19: note = Description of Artificial Sequence: Synthetic oligonucleotide
  source 1..19: mol_type = other RNA
ggtcgaggaacttgcccgg

SEQ ID NO: 4529 - RNA, 19 nt, synthetic construct
  misc_feature 1..19: note = Description of Artificial Sequence: Synthetic oligonucleotide
  source 1..19: mol_type = other RNA
tggtcgaggaacttgcccg

SEQ ID NO: 4530 - RNA, 19 nt, synthetic construct
  misc_feature 1..19: note = Description of Artificial Sequence: Synthetic oligonucleotide
  source 1..19: mol_type = other RNA
ttggtcgaggaacttgccc

SEQ ID NO: 4531 - RNA, 19 nt, synthetic construct
  misc_feature 1..19: note = Description of Artificial Sequence: Synthetic oligonucleotide
  source 1..19: mol_type = other RNA
cttggtcgaggaacttgcc

SEQ ID NO: 4532 - RNA, 19 nt, synthetic construct
  misc_feature 1..19: note = Description of Artificial Sequence: Synthetic oligonucleotide
  source 1..19: mol_type = other RNA
ccttggtcgaggaacttgc

SEQ ID NO: 4533 - RNA, 19 nt, synthetic construct
  misc_feature 1..19: note = Description of Artificial Sequence: Synthetic oligonucleotide
  source 1..19: mol_type = other RNA
accttggtcgaggaacttg

SEQ ID NO: 4534 - RNA, 19 nt, synthetic construct
  misc_feature 1..19: note = Description of Artificial Sequence: Synthetic oligonucleotide
  source 1..19: mol_type = other RNA
gaccttggtcgaggaactt

SEQ ID NO: 4535 - RNA, 19 nt, synthetic construct
  misc_feature 1..19: note = Description of Artificial Sequence: Synthetic oligonucleotide
  source 1..19: mol_type = other RNA
agaccttggtcgaggaact

SEQ ID NO: 4536 - RNA, 19 nt, synthetic construct
  misc_feature 1..19: note = Description of Artificial Sequence: Synthetic oligonucleotide
  source 1..19: mol_type = other RNA
cagaccttggtcgaggaac

SEQ ID NO: 4537 - RNA, 19 nt, synthetic construct
  misc_feature 1..19: note = Description of Artificial Sequence: Synthetic oligonucleotide
  source 1..19: mol_type = other RNA
ccagaccttggtcgaggaa

SEQ ID NO: 4538 - RNA, 19 nt, synthetic construct
  misc_feature 1..19: note = Description of Artificial Sequence: Synthetic oligonucleotide
  source 1..19: mol_type = other RNA
tccagaccttggtcgagga

SEQ ID NO: 4539 - RNA, 19 nt, synthetic construct
  misc_feature 1..19: note = Description of Artificial Sequence: Synthetic oligonucleotide
  source 1..19: mol_type = other RNA
gtccagaccttggtcgagg

SEQ ID NO: 4540 - RNA, 19 nt, synthetic construct
  misc_feature 1..19: note = Description of Artificial Sequence: Synthetic oligonucleotide
  source 1..19: mol_type = other RNA
cgtccagaccttggtcgag

SEQ ID NO: 4541 - RNA, 19 nt, synthetic construct
  misc_feature 1..19: note = Description of Artificial Sequence: Synthetic oligonucleotide
  source 1..19: mol_type = other RNA
tcgtccagaccttggtcga

SEQ ID NO: 4542 - RNA, 19 nt, synthetic construct
  misc_feature 1..19: note = Description of Artificial Sequence: Synthetic oligonucleotide
  source 1..19: mol_type = other RNA
gtcgtccagaccttggtcg

SEQ ID NO: 4543 - RNA, 19 nt, synthetic construct
  misc_feature 1..19: note = Description of Artificial Sequence: Synthetic oligonucleotide
  source 1..19: mol_type = other RNA
tgtcgtccagaccttggtc

SEQ ID NO: 4544 - RNA, 19 nt, synthetic construct
  misc_feature 1..19: note = Description of Artificial Sequence: Synthetic oligonucleotide
  source 1..19: mol_type = other RNA
ttgtcgtccagaccttggt

SEQ ID NO: 4545 - RNA, 19 nt, synthetic construct
  misc_feature 1..19: note = Description of Artificial Sequence: Synthetic oligonucleotide
  source 1..19: mol_type = other RNA
gttgtcgtccagaccttgg

SEQ ID NO: 4546 - RNA, 19 nt, synthetic construct
  misc_feature 1..19: note = Description of Artificial Sequence: Synthetic oligonucleotide
  source 1..19: mol_type = other RNA
agttgtcgtccagaccttg

SEQ ID NO: 4547 - RNA, 19 nt, synthetic construct
  misc_feature 1..19: note = Description of Artificial Sequence: Synthetic oligonucleotide
  source 1..19: mol_type = other RNA
tagttgtcgtccagacctt

SEQ ID NO: 4548 - RNA, 19 nt, synthetic construct
  misc_feature 1..19: note = Description of Artificial Sequence: Synthetic oligonucleotide
  source 1..19: mol_type = other RNA
atagttgtcgtccagacct

SEQ ID NO: 4549 - RNA, 19 nt, synthetic construct
  misc_feature 1..19: note = Description of Artificial Sequence: Synthetic oligonucleotide
  source 1..19: mol_type = other RNA
aatagttgtcgtccagacc

SEQ ID NO: 4550 - RNA, 19 nt, synthetic construct
  misc_feature 1..19: note = Description of Artificial Sequence: Synthetic oligonucleotide
  source 1..19: mol_type = other RNA
caatagttgtcgtccagac

SEQ ID NO: 4551 - RNA, 19 nt, synthetic construct
  misc_feature 1..19: note = Description of Artificial Sequence: Synthetic oligonucleotide
  source 1..19: mol_type = other RNA
gcaatagttgtcgtccaga

SEQ ID NO: 4552 - RNA, 19 nt, synthetic construct
  misc_feature 1..19: note = Description of Artificial Sequence: Synthetic oligonucleotide
  source 1..19: mol_type = other RNA
ggcaatagttgtcgtccag

SEQ ID NO: 4553 - RNA, 19 nt, synthetic construct
  misc_feature 1..19: note = Description of Artificial Sequence: Synthetic oligonucleotide
  source 1..19: mol_type = other RNA
cggcaatagttgtcgtcca

SEQ ID NO: 4554 - RNA, 19 nt, synthetic construct
  misc_feature 1..19: note = Description of Artificial Sequence: Synthetic oligonucleotide
  source 1..19: mol_type = other RNA
ccggcaatagttgtcgtcc

SEQ ID NO: 4555 - RNA, 19 nt, synthetic construct
  misc_feature 1..19: note = Description of Artificial Sequence: Synthetic oligonucleotide
  source 1..19: mol_type = other RNA
tccggcaatagttgtcgtc

SEQ ID NO: 4556 - RNA, 19 nt, synthetic construct
  misc_feature 1..19: note = Description of Artificial Sequence: Synthetic oligonucleotide
  source 1..19: mol_type = other RNA
ttccggcaatagttgtcgt

SEQ ID NO: 4557 - RNA, 19 nt, synthetic construct
  misc_feature 1..19: note = Description of Artificial Sequence: Synthetic oligonucleotide
  source 1..19: mol_type = other RNA
attccggcaatagttgtcg

SEQ ID NO: 4558 - RNA, 19 nt, synthetic construct
  misc_feature 1..19: note = Description of Artificial Sequence: Synthetic oligonucleotide
  source 1..19: mol_type = other RNA
gattccggcaatagttgtc

SEQ ID NO: 4559 - RNA, 19 nt, synthetic construct
  misc_feature 1..19: note = Description of Artificial Sequence: Synthetic oligonucleotide
  source 1..19: mol_type = other RNA
ggattccggcaatagttgt

SEQ ID NO: 4560 - RNA, 19 nt, synthetic construct
  misc_feature 1..19: note = Description of Artificial Sequence: Synthetic oligonucleotide
  source 1..19: mol_type = other RNA
aggattccggcaatagttg

SEQ ID NO: 4561 - RNA, 19 nt, synthetic construct
  misc_feature 1..19: note = Description of Artificial Sequence: Synthetic oligonucleotide
  source 1..19: mol_type = other RNA
caggattccggcaatagtt

SEQ ID NO: 4562 - RNA, 19 nt, synthetic construct
  misc_feature 1..19: note = Description of Artificial Sequence: Synthetic oligonucleotide
  source 1..19: mol_type = other RNA
tcaggattccggcaatagt

SEQ ID NO: 4563 - RNA, 19 nt, synthetic construct
  misc_feature 1..19: note = Description of Artificial Sequence: Synthetic oligonucleotide
  source 1..19: mol_type = other RNA
gtcaggattccggcaatag

SEQ ID NO: 4564 - RNA, 19 nt, synthetic construct
  misc_feature 1..19: note = Description of Artificial Sequence: Synthetic oligonucleotide
  source 1..19: mol_type = other RNA
cgtcaggattccggcaata

SEQ ID NO: 4565 - RNA, 19 nt, synthetic construct
  misc_feature 1..19: note = Description of Artificial Sequence: Synthetic oligonucleotide
  source 1..19: mol_type = other RNA
ccgtcaggattccggcaat

SEQ ID NO: 4566 - RNA, 19 nt, synthetic construct
  misc_feature 1..19: note = Description of Artificial Sequence: Synthetic oligonucleotide
  source 1..19: mol_type = other RNA
gccgtcaggattccggcaa

SEQ ID NO: 4567 - RNA, 19 nt, synthetic construct
  misc_feature 1..19: note = Description of Artificial Sequence: Synthetic oligonucleotide
  source 1..19: mol_type = other RNA
agccgtcaggattccggca

SEQ ID NO: 4568 - RNA, 19 nt, synthetic construct
  misc_feature 1..19: note = Description of Artificial Sequence: Synthetic oligonucleotide
  source 1..19: mol_type = other RNA
gagccgtcaggattccggc

SEQ ID NO: 4569 - RNA, 19 nt, synthetic construct
  misc_feature 1..19: note = Description of Artificial Sequence: Synthetic oligonucleotide
  source 1..19: mol_type = other RNA
ggagccgtcaggattccgg

SEQ ID NO: 4570 - RNA, 19 nt, synthetic construct
  misc_feature 1..19: note = Description of Artificial Sequence: Synthetic oligonucleotide
  source 1..19: mol_type = other RNA
cggagccgtcaggattccg

SEQ ID NO: 4571 - RNA, 19 nt, synthetic construct
  misc_feature 1..19: note = Description of Artificial Sequence: Synthetic oligonucleotide
  source 1..19: mol_type = other RNA
tcggagccgtcaggattcc

SEQ ID NO: 4572 - RNA, 19 nt, synthetic construct
  misc_feature 1..19: note = Description of Artificial Sequence: Synthetic oligonucleotide
  source 1..19: mol_type = other RNA
ctcggagccgtcaggattc

SEQ ID NO: 4573 - RNA, 19 nt, synthetic construct
  misc_feature 1..19: note = Description of Artificial Sequence: Synthetic oligonucleotide
  source 1..19: mol_type = other RNA
gctcggagccgtcaggatt

SEQ ID NO: 4574 - RNA, 19 nt, synthetic construct
  misc_feature 1..19: note = Description of Artificial Sequence: Synthetic oligonucleotide
  source 1..19: mol_type = other RNA
cgctcggagccgtcaggat

SEQ ID NO: 4575 - RNA, 19 nt, synthetic construct
  misc_feature 1..19: note = Description of Artificial Sequence: Synthetic oligonucleotide
  source 1..19: mol_type = other RNA
ccgctcggagccgtcagga

SEQ ID NO: 4576 - RNA, 19 nt, synthetic construct
  misc_feature 1..19: note = Description of Artificial Sequence: Synthetic oligonucleotide
  source 1..19: mol_type = other RNA
gccgctcggagccgtcagg

SEQ ID NO: 4577 - RNA, 19 nt, synthetic construct
  misc_feature 1..19: note = Description of Artificial Sequence: Synthetic oligonucleotide
  source 1..19: mol_type = other RNA
ggccgctcggagccgtcag

SEQ ID NO: 4578 - RNA, 19 nt, synthetic construct
  misc_feature 1..19: note = Description of Artificial Sequence: Synthetic oligonucleotide
  source 1..19: mol_type = other RNA
tggccgctcggagccgtca

SEQ ID NO: 4579 - RNA, 19 nt, synthetic construct
  misc_feature 1..19: note = Description of Artificial Sequence: Synthetic oligonucleotide
  source 1..19: mol_type = other RNA
atggccgctcggagccgtc

SEQ ID NO: 4580 - RNA, 19 nt, synthetic construct
  misc_feature 1..19: note = Description of Artificial Sequence: Synthetic oligonucleotide
  source 1..19: mol_type = other RNA
catggccgctcggagccgt

SEQ ID NO: 4581 - RNA, 19 nt, synthetic construct
  misc_feature 1..19: note = Description of Artificial Sequence: Synthetic oligonucleotide
  source 1..19: mol_type = other RNA
ccatggccgctcggagccg

SEQ ID NO: 4582 - RNA, 19 nt, synthetic construct
  misc_feature 1..19: note = Description of Artificial Sequence: Synthetic oligonucleotide
  source 1..19: mol_type = other RNA
accatggccgctcggagcc

SEQ ID NO: 4583 - RNA, 19 nt, synthetic construct
  misc_feature 1..19: note = Description of Artificial Sequence: Synthetic oligonucleotide
  source 1..19: mol_type = other RNA
caccatggccgctcggagc

SEQ ID NO: 4584 - RNA, 19 nt, synthetic construct
  misc_feature 1..19: note = Description of Artificial Sequence: Synthetic oligonucleotide
  source 1..19: mol_type = other RNA
gcaccatggccgctcggag

SEQ ID NO: 4585 - RNA, 19 nt, synthetic construct
  misc_feature 1..19: note = Description of Artificial Sequence: Synthetic oligonucleotide
  source 1..19: mol_type = other RNA
agcaccatggccgctcgga

SEQ ID NO: 4586 - RNA, 19 nt, synthetic construct
  misc_feature 1..19: note = Description of Artificial Sequence: Synthetic oligonucleotide
  source 1..19: mol_type = other RNA
tagcaccatggccgctcgg

SEQ ID NO: 4587 - RNA, 19 nt, synthetic construct
  misc_feature 1..19: note = Description of Artificial Sequence: Synthetic oligonucleotide
  source 1..19: mol_type = other RNA
gtagcaccatggccgctcg

SEQ ID NO: 4588 - RNA, 19 nt, synthetic construct
  misc_feature 1..19: note = Description of Artificial Sequence: Synthetic oligonucleotide
  source 1..19: mol_type = other RNA
tgtagcaccatggccgctc

SEQ ID NO: 4589 - RNA, 19 nt, synthetic construct
  misc_feature 1..19: note = Description of Artificial Sequence: Synthetic oligonucleotide
  source 1..19: mol_type = other RNA
gtgtagcaccatggccgct

SEQ ID NO: 4590 - RNA, 19 nt, synthetic construct
  misc_feature 1..19: note = Description of Artificial Sequence: Synthetic oligonucleotide
  source 1..19: mol_type = other RNA
agtgtagcaccatggccgc

SEQ ID NO: 4591 - RNA, 19 nt, synthetic construct
  misc_feature 1..19: note = Description of Artificial Sequence: Synthetic oligonucleotide
  source 1..19: mol_type = other RNA
tagtgtagcaccatggccg

SEQ ID NO: 4592 - RNA, 19 nt, synthetic construct
  misc_feature 1..19: note = Description of Artificial Sequence: Synthetic oligonucleotide
  source 1..19: mol_type = other RNA
gtagtgtagcaccatggcc

SEQ ID NO: 4593 - RNA, 19 nt, synthetic construct
  misc_feature 1..19: note = Description of Artificial Sequence: Synthetic oligonucleotide
  source 1..19: mol_type = other RNA
cgtagtgtagcaccatggc

SEQ ID NO: 4594 - RNA, 19 nt, synthetic construct
  misc_feature 1..19: note = Description of Artificial Sequence: Synthetic oligonucleotide
  source 1..19: mol_type = other RNA
ccgtagtgtagcaccatgg

SEQ ID NO: 4595 - RNA, 19 nt, synthetic construct
  misc_feature 1..19: note = Description of Artificial Sequence: Synthetic oligonucleotide
  source 1..19: mol_type = other RNA
tccgtagtgtagcaccatg

SEQ ID NO: 4596 - RNA, 19 nt, synthetic construct
  misc_feature 1..19: note = Description of Artificial Sequence: Synthetic oligonucleotide
  source 1..19: mol_type = other RNA
atccgtagtgtagcaccat

SEQ ID NO: 4597 - RNA, 19 nt, synthetic construct
  misc_feature 1..19: note = Description of Artificial Sequence: Synthetic oligonucleotide
  source 1..19: mol_type = other RNA
gatccgtagtgtagcacca

SEQ ID NO: 4598 - RNA, 19 nt, synthetic construct
  misc_feature 1..19: note = Description of Artificial Sequence: Synthetic oligonucleotide
  source 1..19: mol_type = other RNA
ggatccgtagtgtagcacc

SEQ ID NO: 4599 - RNA, 19 nt, synthetic construct
  misc_feature 1..19: note = Description of Artificial Sequence: Synthetic oligonucleotide
  source 1..19: mol_type = other RNA
cggatccgtagtgtagcac

SEQ ID NO: 4600 - RNA, 19 nt, synthetic construct
  misc_feature 1..19: note = Description of Artificial Sequence: Synthetic oligonucleotide
  source 1..19: mol_type = other RNA
gcggatccgtagtgtagca

SEQ ID NO: 4601 - RNA, 19 nt, synthetic construct
  misc_feature 1..19: note = Description of Artificial Sequence: Synthetic oligonucleotide
  source 1..19: mol_type = other RNA
tgcggatccgtagtgtagc

SEQ ID NO: 4602 - RNA, 19 nt, synthetic construct
  misc_feature 1..19: note = Description of Artificial Sequence: Synthetic oligonucleotide
  source 1..19: mol_type = other RNA
ctgcggatccgtagtgtag

SEQ ID NO: 4603 - RNA, 19 nt, synthetic construct
  misc_feature 1..19: note = Description of Artificial Sequence: Synthetic oligonucleotide
  source 1..19: mol_type = other RNA
tctgcggatccgtagtgta

SEQ ID NO: 4604 - RNA, 19 nt, synthetic construct
  misc_feature 1..19: note = Description of Artificial Sequence: Synthetic oligonucleotide
  source 1..19: mol_type = other RNA
atctgcggatccgtagtgt

SEQ ID NO: 4605 - RNA, 19 nt, synthetic construct
  misc_feature 1..19: note = Description of Artificial Sequence: Synthetic oligonucleotide
  source 1..19: mol_type = other RNA
gatctgcggatccgtagtg

SEQ ID NO: 4606 - RNA, 19 nt, synthetic construct
  misc_feature 1..19: note = Description of Artificial Sequence: Synthetic oligonucleotide
  source 1..19: mol_type = other RNA
cgatctgcggatccgtagt

SEQ ID NO: 4607 - RNA, 19 nt, synthetic construct
  misc_feature 1..19: note = Description of Artificial Sequence: Synthetic oligonucleotide
  source 1..19: mol_type = other RNA
tcgatctgcggatccgtag

SEQ ID NO: 4608 - RNA, 19 nt, synthetic construct
  misc_feature 1..19: note = Description of Artificial Sequence: Synthetic oligonucleotide
  source 1..19: mol_type = other RNA
ctcgatctgcggatccgta

SEQ ID NO: 4609 - RNA, 19 nt, synthetic construct
  misc_feature 1..19: note = Description of Artificial Sequence: Synthetic oligonucleotide
  source 1..19: mol_type = other RNA
gctcgatctgcggatccgt

SEQ ID NO: 4610 - RNA, 19 nt, synthetic construct
  misc_feature 1..19: note = Description of Artificial Sequence: Synthetic oligonucleotide
  source 1..19: mol_type = other RNA
cgctcgatctgcggatccg

SEQ ID NO: 4611 - RNA, 19 nt, synthetic construct
  misc_feature 1..19: note = Description of Artificial Sequence: Synthetic oligonucleotide
  source 1..19: mol_type = other RNA
tcgctcgatctgcggatcc

SEQ ID NO: 4612 - RNA, 19 nt, synthetic construct
  misc_feature 1..19: note = Description of Artificial Sequence: Synthetic oligonucleotide
  source 1..19: mol_type = other RNA
ctcgctcgatctgcggatc

SEQ ID NO: 4613 - RNA, 19 nt, synthetic construct
  misc_feature 1..19: note = Description of Artificial Sequence: Synthetic oligonucleotide
  source 1..19: mol_type = other RNA
tctcgctcgatctgcggat

SEQ ID NO: 4614 - RNA, 19 nt, synthetic construct
  misc_feature 1..19: note = Description of Artificial Sequence: Synthetic oligonucleotide
  source 1..19: mol_type = other RNA
ctctcgctcgatctgcgga

SEQ ID NO: 4615 - RNA, 19 nt, synthetic construct
  misc_feature 1..19: note = Description of Artificial Sequence: Synthetic oligonucleotide
  source 1..19: mol_type = other RNA
actctcgctcgatctgcgg

SEQ ID NO: 4616 - RNA, 19 nt, synthetic construct
  misc_feature 1..19: note = Description of Artificial Sequence: Synthetic oligonucleotide
  source 1..19: mol_type = other RNA
aactctcgctcgatctgcg

SEQ ID NO: 4617 - RNA, 19 nt, synthetic construct
  misc_feature 1..19: note = Description of Artificial Sequence: Synthetic oligonucleotide
  source 1..19: mol_type = other RNA
gaactctcgctcgatctgc

SEQ ID NO: 4618 - RNA, 19 nt, synthetic construct
  misc_feature 1..19: note = Description of Artificial Sequence: Synthetic oligonucleotide
  source 1..19: mol_type = other RNA
agaactctcgctcgatctg

SEQ ID NO: 4619 - RNA, 19 nt, synthetic construct
  misc_feature 1..19: note = Description of Artificial Sequence: Synthetic oligonucleotide
  source 1..19: mol_type = other RNA
cagaactctcgctcgatct

SEQ ID NO: 4620 - RNA, 19 nt, synthetic construct
  misc_feature 1..19: note = Description of Artificial Sequence: Synthetic oligonucleotide
  source 1..19: mol_type = other RNA
acagaactctcgctcgatc

SEQ ID NO: 4621 - RNA, 19 nt, synthetic construct
  misc_feature 1..19: note = Description of Artificial Sequence: Synthetic oligonucleotide
  source 1..19: mol_type = other RNA
cacagaactctcgctcgat

SEQ ID NO: 4622 - RNA, 19 nt, synthetic construct
  misc_feature 1..19: note = Description of Artificial Sequence: Synthetic oligonucleotide
  source 1..19: mol_type = other RNA
tcacagaactctcgctcga

SEQ ID NO: 4623 - RNA, 19 nt, synthetic construct
  misc_feature 1..19: note = Description of Artificial Sequence: Synthetic oligonucleotide
  source 1..19: mol_type = other RNA
gtcacagaactctcgctcg

SEQ ID NO: 4624 - RNA, 19 nt, synthetic construct
  misc_feature 1..19: note = Description of Artificial Sequence: Synthetic oligonucleotide
  source 1..19: mol_type = other RNA
ggtcacagaactctcgctc

SEQ ID NO: 4625 - RNA, 19 nt, synthetic construct
  misc_feature 1..19: note = Description of Artificial Sequence: Synthetic oligonucleotide
  source 1..19: mol_type = other RNA
aggtcacagaactctcgct

SEQ ID NO: 4626 - RNA, 19 nt, synthetic construct
  misc_feature 1..19: note = Description of Artificial Sequence: Synthetic oligonucleotide
  source 1..19: mol_type = other RNA
gaggtcacagaactctcgc

SEQ ID NO: 4627 - RNA, 19 nt, synthetic construct
  misc_feature 1..19: note = Description of Artificial Sequence: Synthetic oligonucleotide
  source 1..19: mol_type = other RNA
ggaggtcacagaactctcg

SEQ ID NO: 4628 - RNA, 19 nt, synthetic construct
  misc_feature 1..19: note = Description of Artificial Sequence: Synthetic oligonucleotide
  source 1..19: mol_type = other RNA
gggaggtcacagaactctc

SEQ ID NO: 4629 - RNA, 19 nt, synthetic construct
  misc_feature 1..19: note = Description of Artificial Sequence: Synthetic oligonucleotide
  source 1..19: mol_type = other RNA
ggggaggtcacagaactct

SEQ ID NO: 4630 - RNA, 19 nt, synthetic construct
  misc_feature 1..19: note = Description of Artificial Sequence: Synthetic oligonucleotide
  source 1..19: mol_type = other RNA
gggggaggtcacagaactc

SEQ ID NO: 4631 - RNA, 19 nt, synthetic construct
  misc_feature 1..19: note = Description of Artificial Sequence: Synthetic oligonucleotide
  source 1..19: mol_type = other RNA
cgggggaggtcacagaact

SEQ ID NO: 4632 - RNA, 19 nt, synthetic construct
  misc_feature 1..19: note = Description of Artificial Sequence: Synthetic oligonucleotide
  source 1..19: mol_type = other RNA
gcgggggaggtcacagaac

SEQ ID NO: 4633 - RNA, 19 nt, synthetic construct
  misc_feature 1..19: note = Description of Artificial Sequence: Synthetic oligonucleotide
  source 1..19: mol_type = other RNA
agcgggggaggtcacagaa

SEQ ID NO: 4634 - RNA, 19 nt, synthetic construct
  misc_feature 1..19: note = Description of Artificial Sequence: Synthetic oligonucleotide
  source 1..19: mol_type = other RNA
cagcgggggaggtcacaga

SEQ ID NO: 4635 - RNA, 19 nt, synthetic construct
  misc_feature 1..19: note = Description of Artificial Sequence: Synthetic oligonucleotide
  source 1..19: mol_type = other RNA
gcagcgggggaggtcacag

SEQ ID NO: 4636 - RNA, 19 nt, synthetic construct
  misc_feature 1..19: note = Description of Artificial Sequence: Synthetic oligonucleotide
  source 1..19: mol_type = other RNA
cgcagcgggggaggtcaca

SEQ ID NO: 4637 - RNA, 19 nt, synthetic construct
  misc_feature 1..19: note = Description of Artificial Sequence: Synthetic oligonucleotide
  source 1..19: mol_type = other RNA
ccgcagcgggggaggtcac

SEQ ID NO: 4638 - RNA, 19 nt, synthetic construct
  misc_feature 1..19: note = Description of Artificial Sequence: Synthetic oligonucleotide
  source 1..19: mol_type = other RNA
cccgcagcgggggaggtca

SEQ ID NO: 4639 - RNA, 19 nt, synthetic construct
  misc_feature 1..19: note = Description of Artificial Sequence: Synthetic oligonucleotide
  source 1..19: mol_type = other RNA
acccgcagcgggggaggtc

SEQ ID NO: 4640 - RNA, 19 nt, synthetic construct
  misc_feature 1..19: note = Description of Artificial Sequence: Synthetic oligonucleotide
  source 1..19: mol_type = other RNA
gacccgcagcgggggaggt

SEQ ID NO: 4641 - RNA, 19 nt, synthetic construct
  misc_feature 1..19: note = Description of Artificial Sequence: Synthetic oligonucleotide
  source 1..19: mol_type = other RNA
ggacccgcagcgggggagg

SEQ ID NO: 4642 - RNA, 19 nt, synthetic construct
  misc_feature 1..19: note = Description of Artificial Sequence: Synthetic oligonucleotide
  source 1..19: mol_type = other RNA
cggacccgcagcgggggag

SEQ ID NO: 4643 - RNA, 19 nt, synthetic construct
  misc_feature 1..19: note = Description of Artificial Sequence: Synthetic oligonucleotide
  source 1..19: mol_type = other RNA
tcggacccgcagcggggga

SEQ ID NO: 4644 - RNA, 19 nt, synthetic construct
  misc_feature 1..19: note = Description of Artificial Sequence: Synthetic oligonucleotide
  source 1..19: mol_type = other RNA
ctcggacccgcagcggggg

SEQ ID NO: 4645 - RNA, 19 nt, synthetic construct
  misc_feature 1..19: note = Description of Artificial Sequence: Synthetic oligonucleotide
  source 1..19: mol_type = other RNA
cctcggacccgcagcgggg

SEQ ID NO: 4646 - RNA, 19 nt, synthetic construct
  misc_feature 1..19: note = Description of Artificial Sequence: Synthetic oligonucleotide
  source 1..19: mol_type = other RNA
gcctcggacccgcagcggg

SEQ ID NO: 4647 - RNA, 19 nt, synthetic construct
  misc_feature 1..19: note = Description of Artificial Sequence: Synthetic oligonucleotide
  source 1..19: mol_type = other RNA
tgcctcggacccgcagcgg

SEQ ID NO: 4648 - RNA, 19 nt, synthetic construct
  misc_feature 1..19: note = Description of Artificial Sequence: Synthetic oligonucleotide
  source 1..19: mol_type = other RNA
gtgcctcggacccgcagcg

SEQ ID NO: 4649 - RNA, 19 nt, synthetic construct
  misc_feature 1..19: note = Description of Artificial Sequence: Synthetic oligonucleotide
  source 1..19: mol_type = other RNA
tgtgcctcggacccgcagc

SEQ ID NO: 4650 - RNA, 19 nt, synthetic construct
  misc_feature 1..19: note = Description of Artificial Sequence: Synthetic oligonucleotide
  source 1..19: mol_type = other RNA
ctgtgcctcggacccgcag

SEQ ID NO: 4651 - RNA, 19 nt, synthetic construct
  misc_feature 1..19: note = Description of Artificial Sequence: Synthetic oligonucleotide
  source 1..19: mol_type = other RNA
gctgtgcctcggacccgca

SEQ ID NO: 4652 - RNA, 19 nt, synthetic construct
  misc_feature 1..19: note = Description of Artificial Sequence: Synthetic oligonucleotide
  source 1..19: mol_type = other RNA
ggctgtgcctcggacccgc

SEQ ID NO: 4653 - RNA, 19 nt, synthetic construct
  misc_feature 1..19: note = Description of Artificial Sequence: Synthetic oligonucleotide
  source 1..19: mol_type = other RNA
gggctgtgcctcggacccg

SEQ ID NO: 4654 - RNA, 19 nt, synthetic construct
  misc_feature 1..19: note = Description of Artificial Sequence: Synthetic oligonucleotide
  source 1..19: mol_type = other RNA
ggggctgtgcctcggaccc

SEQ ID NO: 4655 - RNA, 19 nt, synthetic construct
  misc_feature 1..19: note = Description of Artificial Sequence: Synthetic oligonucleotide
  source 1..19: mol_type = other RNA
cggggctgtgcctcggacc

SEQ ID NO: 4656 - RNA, 19 nt, synthetic construct
  misc_feature 1..19: note = Description of Artificial Sequence: Synthetic oligonucleotide
  source 1..19: mol_type = other RNA
gcggggctgtgcctcggac

SEQ ID NO: 4657 - RNA, 19 nt, synthetic construct
  misc_feature 1..19: note = Description of Artificial Sequence: Synthetic oligonucleotide
  source 1..19: mol_type = other RNA
ggcggggctgtgcctcgga

SEQ ID NO: 4658 - RNA, 19 nt, synthetic construct
  misc_feature 1..19: note = Description of Artificial Sequence: Synthetic oligonucleotide
  source 1..19: mol_type = other RNA
tggcggggctgtgcctcgg

SEQ ID NO: 4659 - RNA, 19 nt, synthetic construct
  misc_feature 1..19: note = Description of Artificial Sequence: Synthetic oligonucleotide
  source 1..19: mol_type = other RNA
ttggcggggctgtgcctcg

SEQ ID NO: 4660 - RNA, 19 nt, synthetic construct
  misc_feature 1..19: note = Description of Artificial Sequence: Synthetic oligonucleotide
  source 1..19: mol_type = other RNA
cttggcggggctgtgcctc

SEQ ID NO: 4661 - RNA, 19 nt, synthetic construct
  misc_feature 1..19: note = Description of Artificial Sequence: Synthetic oligonucleotide
  source 1..19: mol_type = other RNA
tcttggcggggctgtgcct

SEQ ID NO: 4662 - RNA, 19 nt, synthetic construct
  misc_feature 1..19: note = Description of Artificial Sequence: Synthetic oligonucleotide
  source 1..19: mol_type = other RNA
ctcttggcggggctgtgcc

SEQ ID NO: 4663 - RNA, 19 nt, synthetic construct
  misc_feature 1..19: note = Description of Artificial Sequence: Synthetic oligonucleotide
  source 1..19: mol_type = other RNA
cctcttggcggggctgtgc

SEQ ID NO: 4664 - RNA, 19 nt, synthetic construct
  misc_feature 1..19: note = Description of Artificial Sequence: Synthetic oligonucleotide
  source 1..19: mol_type = other RNA
gcctcttggcggggctgtg

SEQ ID NO: 4665 - RNA, 19 nt, synthetic construct
  misc_feature 1..19: note = Description of Artificial Sequence: Synthetic oligonucleotide
  source 1..19: mol_type = other RNA
ggcctcttggcggggctgt

SEQ ID NO: 4666 - RNA, 19 nt, synthetic construct
  misc_feature 1..19: note = Description of Artificial Sequence: Synthetic oligonucleotide
  source 1..19: mol_type = other RNA
tggcctcttggcggggctg

SEQ ID NO: 4667 - RNA, 19 nt, synthetic construct
  misc_feature 1..19: note = Description of Artificial Sequence: Synthetic oligonucleotide
  source 1..19: mol_type = other RNA
gtggcctcttggcggggct

SEQ ID NO: 4668 - RNA, 19 nt, synthetic construct
  misc_feature 1..19: note = Description of Artificial Sequence: Synthetic oligonucleotide
  source 1..19: mol_type = other RNA
tgtggcctcttggcggggc

SEQ ID NO: 4669 - RNA, 19 nt, synthetic construct
  misc_feature 1..19: note = Description of Artificial Sequence: Synthetic oligonucleotide
  source 1..19: mol_type = other RNA
ttgtggcctcttggcgggg

SEQ ID NO: 4670 - RNA, 19 nt, synthetic construct
  misc_feature 1..19: note = Description of Artificial Sequence: Synthetic oligonucleotide
  source 1..19: mol_type = other RNA
gttgtggcctcttggcggg

SEQ ID NO: 4671 - RNA, 19 nt, synthetic construct
  misc_feature 1..19: note = Description of Artificial Sequence: Synthetic oligonucleotide
  source 1..19: mol_type = other RNA
agttgtggcctcttggcgg

SEQ ID NO: 4672 - RNA, 19 nt, synthetic construct
  misc_feature 1..19: note = Description of Artificial Sequence: Synthetic oligonucleotide
  source 1..19: mol_type = other RNA
cagttgtggcctcttggcg

SEQ ID NO: 4673 - RNA, 19 nt, synthetic construct
  misc_feature 1..19: note = Description of Artificial Sequence: Synthetic oligonucleotide
  source 1..19: mol_type = other RNA
acagttgtggcctcttggc

SEQ ID NO: 4674 - RNA, 19 nt, synthetic construct
  misc_feature 1..19: note = Description of Artificial Sequence: Synthetic oligonucleotide
  source 1..19: mol_type = other RNA
gacagttgtggcctcttgg

SEQ ID NO: 4675 - RNA, 19 nt, synthetic construct
  misc_feature 1..19: note = Description of Artificial Sequence: Synthetic oligonucleotide
  source 1..19: mol_type = other RNA
tgacagttgtggcctcttg

SEQ ID NO: 4676 - RNA, 19 nt, synthetic construct
  misc_feature 1..19: note = Description of Artificial Sequence: Synthetic oligonucleotide
  source 1..19: mol_type = other RNA
ctgacagttgtggcctctt

SEQ ID NO: 4677 - RNA, 19 nt, synthetic construct
  misc_feature 1..19: note = Description of Artificial Sequence: Synthetic oligonucleotide
  source 1..19: mol_type = other RNA
gctgacagttgtggcctct

SEQ ID NO: 4678 - RNA, 19 nt, synthetic construct
  misc_feature 1..19: note = Description of Artificial Sequence: Synthetic oligonucleotide
  source 1..19: mol_type = other RNA
agctgacagttgtggcctc

SEQ ID NO: 4679 - RNA, 19 nt, synthetic construct
  misc_feature 1..19: note = Description of Artificial Sequence: Synthetic oligonucleotide
  source 1..19: mol_type = other RNA
cagctgacagttgtggcct

SEQ ID NO: 4680 - RNA, 19 nt, synthetic construct
  misc_feature 1..19: note = Description of Artificial Sequence: Synthetic oligonucleotide
  source 1..19: mol_type = other RNA
gcagctgacagttgtggcc

SEQ ID NO: 4681 - RNA, 19 nt, synthetic construct
  misc_feature 1..19: note = Description of Artificial Sequence: Synthetic oligonucleotide
  source 1..19: mol_type = other RNA
agcagctgacagttgtggc

SEQ ID NO: 4682 - RNA, 19 nt, synthetic construct
  misc_feature 1..19: note = Description of Artificial Sequence: Synthetic oligonucleotide
  source 1..19: mol_type = other RNA
aagcagctgacagttgtgg

SEQ ID NO: 4683 - RNA, 19 nt, synthetic construct
  misc_feature 1..19: note = Description of Artificial Sequence: Synthetic oligonucleotide
  source 1..19: mol_type = other RNA
gaagcagctgacagttgtg

SEQ ID NO: 4684 - RNA, 19 nt, synthetic construct
  misc_feature 1..19: note = Description of Artificial Sequence: Synthetic oligonucleotide
  source 1..19: mol_type = other RNA
ggaagcagctgacagttgt

SEQ ID NO: 4685 - RNA, 19 nt, synthetic construct
  misc_feature 1..19: note = Description of Artificial Sequence: Synthetic oligonucleotide
  source 1..19: mol_type = other RNA
cggaagcagctgacagttg

SEQ ID NO: 4686 - RNA, 19 nt, synthetic construct
  misc_feature 1..19: note = Description of Artificial Sequence: Synthetic oligonucleotide
  source 1..19: mol_type = other RNA
gcggaagcagctgacagtt

SEQ ID NO: 4687 - RNA, 19 nt, synthetic construct
  misc_feature 1..19: note = Description of Artificial Sequence: Synthetic oligonucleotide
  source 1..19: mol_type = other RNA
cgcggaagcagctgacagt

SEQ ID NO: 4688 - RNA, 19 nt, synthetic construct
  misc_feature 1..19: note = Description of Artificial Sequence: Synthetic oligonucleotide
  source 1..19: mol_type = other RNA
ccgcggaagcagctgacag

SEQ ID NO: 4689 - RNA, 19 nt, synthetic construct
  misc_feature 1..19: note = Description of Artificial Sequence: Synthetic oligonucleotide
  source 1..19: mol_type = other RNA
cccgcggaagcagctgaca

SEQ ID NO: 4690 - RNA, 19 nt, synthetic construct
  misc_feature 1..19: note = Description of Artificial Sequence: Synthetic oligonucleotide
  source 1..19: mol_type = other RNA
tcccgcggaagcagctgac

SEQ ID NO: 4691 - RNA, 19 nt, synthetic construct
  misc_feature 1..19: note = Description of Artificial Sequence: Synthetic oligonucleotide
  source 1..19: mol_type = other RNA
ttcccgcggaagcagctga

SEQ ID NO: 4692 - RNA, 19 nt, synthetic construct
  misc_feature 1..19: note = Description of Artificial Sequence: Synthetic oligonucleotide
  source 1..19: mol_type = other RNA
cttcccgcggaagcagctg

SEQ ID NO: 4693 - RNA, 19 nt, synthetic construct
  misc_feature 1..19: note = Description of Artificial Sequence: Synthetic oligonucleotide
  source 1..19: mol_type = other RNA
ccttcccgcggaagcagct

SEQ ID NO: 4694 - RNA, 19 nt, synthetic construct
  misc_feature 1..19: note = Description of Artificial Sequence: Synthetic oligonucleotide
  source 1..19: mol_type = other RNA
cccttcccgcggaagcagc

SEQ ID NO: 4695 - RNA, 19 nt, synthetic construct
  misc_feature 1..19: note = Description of Artificial Sequence: Synthetic oligonucleotide
  source 1..19: mol_type = other RNA
acccttcccgcggaagcag

SEQ ID NO: 4696 - RNA, 19 nt, synthetic construct
  misc_feature 1..19: note = Description of Artificial Sequence: Synthetic oligonucleotide
  source 1..19: mol_type = other RNA
cacccttcccgcggaagca

SEQ ID NO: 4697 - RNA, 19 nt, synthetic construct
  misc_feature 1..19: note = Description of Artificial Sequence: Synthetic oligonucleotide
  source 1..19: mol_type = other RNA
tcacccttcccgcggaagc

SEQ ID NO: 4698 - RNA, 19 nt, synthetic construct
  misc_feature 1..19: note = Description of Artificial Sequence: Synthetic oligonucleotide
  source 1..19: mol_type = other RNA
ctcacccttcccgcggaag

SEQ ID NO: 4699 - RNA, 19 nt, synthetic construct
  misc_feature 1..19: note = Description of Artificial Sequence: Synthetic oligonucleotide
  source 1..19: mol_type = other RNA
cctcacccttcccgcggaa

SEQ ID NO: 4700 - RNA, 19 nt, synthetic construct
  misc_feature 1..19: note = Description of Artificial Sequence: Synthetic oligonucleotide
  source 1..19: mol_type = other RNA
ccctcacccttcccgcgga

SEQ ID NO: 4701 - RNA, 19 nt, synthetic construct
  misc_feature 1..19: note = Description of Artificial Sequence: Synthetic oligonucleotide
  source 1..19: mol_type = other RNA
gccctcacccttcccgcgg

SEQ ID NO: 4702 - RNA, 19 nt, synthetic construct
  misc_feature 1..19: note = Description of Artificial Sequence: Synthetic oligonucleotide
  source 1..19: mol_type = other RNA
agccctcacccttcccgcg

SEQ ID NO: 4703 - RNA, 19 nt, synthetic construct
  misc_feature 1..19: note = Description of Artificial Sequence: Synthetic oligonucleotide
  source 1..19: mol_type = other RNA
tagccctcacccttcccgc

SEQ ID NO: 4704 - RNA, 19 nt, synthetic construct
  misc_feature 1..19: note = Description of Artificial Sequence: Synthetic oligonucleotide
  source 1..19: mol_type = other RNA
gtagccctcacccttcccg

SEQ ID NO: 4705 - RNA, 19 nt, synthetic construct
  misc_feature 1..19: note = Description of Artificial Sequence: Synthetic oligonucleotide
  source 1..19: mol_type = other RNA
ggtagccctcacccttccc

SEQ ID NO: 4706 - RNA, 19 nt, synthetic construct
  misc_feature 1..19: note = Description of Artificial Sequence: Synthetic oligonucleotide
  source 1..19: mol_type = other RNA
cggtagccctcacccttcc

SEQ ID NO: 4707 - RNA, 19 nt, synthetic construct
  misc_feature 1..19: note = Description of Artificial Sequence: Synthetic oligonucleotide
  source 1..19: mol_type = other RNA
ccggtagccctcacccttc

SEQ ID NO: 4708 - RNA, 19 nt, synthetic construct
  misc_feature 1..19: note = Description of Artificial Sequence: Synthetic oligonucleotide
  source 1..19: mol_type = other RNA
cccggtagccctcaccctt

SEQ ID NO: 4709 - RNA, 19 nt, synthetic construct
  misc_feature 1..19: note = Description of Artificial Sequence: Synthetic oligonucleotide
  source 1..19: mol_type = other RNA
ccccggtagccctcaccct

SEQ ID NO: 4710 - RNA, 19 nt, synthetic construct
  misc_feature 1..19: note = Description of Artificial Sequence: Synthetic oligonucleotide
  source 1..19: mol_type = other RNA
gccccggtagccctcaccc

SEQ ID NO: 4711 - RNA, 19 nt, synthetic construct
  misc_feature 1..19: note = Description of Artificial Sequence: Synthetic oligonucleotide
  source 1..19: mol_type = other RNA
tgccccggtagccctcacc

SEQ ID NO: 4712 - RNA, 19 nt, synthetic construct
  misc_feature 1..19: note = Description of Artificial Sequence: Synthetic oligonucleotide
  source 1..19: mol_type = other RNA
gtgccccggtagccctcac

SEQ ID NO: 4713 - RNA, 19 nt, synthetic construct
  misc_feature 1..19: note = Description of Artificial Sequence: Synthetic oligonucleotide
  source 1..19: mol_type = other RNA
tgtgccccggtagccctca

SEQ ID NO: 4714 - RNA, 19 nt, synthetic construct
  misc_feature 1..19: note = Description of Artificial Sequence: Synthetic oligonucleotide
  source 1..19: mol_type = other RNA
ctgtgccccggtagccctc

SEQ ID NO: 4715 - RNA, 19 nt, synthetic construct
  misc_feature 1..19: note = Description of Artificial Sequence: Synthetic oligonucleotide
  source 1..19: mol_type = other RNA
gctgtgccccggtagccct

SEQ ID NO: 4716 - RNA, 19 nt, synthetic construct
  misc_feature 1..19: note = Description of Artificial Sequence: Synthetic oligonucleotide
  source 1..19: mol_type = other RNA
ggctgtgccccggtagccc

SEQ ID NO: 4717 - RNA, 19 nt, synthetic construct
  misc_feature 1..19: note = Description of Artificial Sequence: Synthetic oligonucleotide
  source 1..19: mol_type = other RNA
tggctgtgccccggtagcc

SEQ ID NO: 4718 - RNA, 19 nt, synthetic construct
  misc_feature 1..19: note = Description of Artificial Sequence: Synthetic oligonucleotide
  source 1..19: mol_type = other RNA
ttggctgtgccccggtagc

SEQ ID NO: 4719 - RNA, 19 nt, synthetic construct
  misc_feature 1..19: note = Description of Artificial Sequence: Synthetic oligonucleotide
  source 1..19: mol_type = other RNA
attggctgtgccccggtag

SEQ ID NO: 4720 - RNA, 19 nt, synthetic construct
  misc_feature 1..19: note = Description of Artificial Sequence: Synthetic oligonucleotide
  source 1..19: mol_type = other RNA
tattggctgtgccccggta

SEQ ID NO: 4721 - RNA, 19 nt, synthetic construct
  misc_feature 1..19: note = Description of Artificial Sequence: Synthetic oligonucleotide
  source 1..19: mol_type = other RNA
gtattggctgtgccccggt

SEQ ID NO: 4722 - RNA, 19 nt, synthetic construct
  misc_feature 1..19: note = Description of Artificial Sequence: Synthetic oligonucleotide
  source 1..19: mol_type = other RNA
ggtattggctgtgccccgg

SEQ ID NO: 4723 - RNA, 19 nt, synthetic construct
  misc_feature 1..19: note = Description of Artificial Sequence: Synthetic oligonucleotide
  source 1..19: mol_type = other RNA
tggtattggctgtgccccg

SEQ ID NO: 4724 - RNA, 19 nt, synthetic construct
  misc_feature 1..19: note = Description of Artificial Sequence: Synthetic oligonucleotide
  source 1..19: mol_type = other RNA
gtggtattggctgtgcccc

SEQ ID NO: 4725 - RNA, 19 nt, synthetic construct
  misc_feature 1..19: note = Description of Artificial Sequence: Synthetic oligonucleotide
  source 1..19: mol_type = other RNA
ggtggtattggctgtgccc

SEQ ID NO: 4726 - RNA, 19 nt, synthetic construct
  misc_feature 1..19: note = Description of Artificial Sequence: Synthetic oligonucleotide
  source 1..19: mol_type = other RNA
tggtggtattggctgtgcc

SEQ ID NO: 4727 - RNA, 19 nt, synthetic construct
  misc_feature 1..19: note = Description of Artificial Sequence: Synthetic oligonucleotide
  source 1..19: mol_type = other RNA
gtggtggtattggctgtgc

SEQ ID NO: 4728 - RNA, 19 nt, synthetic construct
  misc_feature 1..19: note = Description of Artificial Sequence: Synthetic oligonucleotide
  source 1..19: mol_type = other RNA
agtggtggtattggctgtg

SEQ ID NO: 4729 - RNA, 19 nt, synthetic construct
  misc_feature 1..19: note = Description of Artificial Sequence: Synthetic oligonucleotide
  source 1..19: mol_type = other RNA
cagtggtggtattggctgt

SEQ ID NO: 4730 - RNA, 19 nt, synthetic construct
  misc_feature 1..19: note = Description of Artificial Sequence: Synthetic oligonucleotide
  source 1..19: mol_type = other RNA
gcagtggtggtattggctg

SEQ ID NO: 4731 - RNA, 19 nt, synthetic construct
  misc_feature 1..19: note = Description of Artificial Sequence: Synthetic oligonucleotide
  source 1..19: mol_type = other RNA
cgcagtggtggtattggct

SEQ ID NO: 4732 - RNA, 19 nt, synthetic construct
  misc_feature 1..19: note = Description of Artificial Sequence: Synthetic oligonucleotide
  source 1..19: mol_type = other RNA
ccgcagtggtggtattggc

SEQ ID NO: 4733 - RNA, 19 nt, synthetic construct
  misc_feature 1..19: note = Description of Artificial Sequence: Synthetic oligonucleotide
  source 1..19: mol_type = other RNA
cccgcagtggtggtattgg

SEQ ID NO: 4734 - RNA, 19 nt, synthetic construct
  misc_feature 1..19: note = Description of Artificial Sequence: Synthetic oligonucleotide
  source 1..19: mol_type = other RNA
gcccgcagtggtggtattg

SEQ ID NO: 4735 - RNA, 19 nt, synthetic construct
  misc_feature 1..19: note = Description of Artificial Sequence: Synthetic oligonucleotide
  source 1..19: mol_type = other RNA
cgcccgcagtggtggtatt

SEQ ID NO: 4736 - RNA, 19 nt, synthetic construct
  misc_feature 1..19: note = Description of Artificial Sequence: Synthetic oligonucleotide
  source 1..19: mol_type = other RNA
acgcccgcagtggtggtat

SEQ ID NO: 4737 - RNA, 19 nt, synthetic construct
  misc_feature 1..19: note = Description of Artificial Sequence: Synthetic oligonucleotide
  source 1..19: mol_type = other RNA
tacgcccgcagtggtggta

SEQ ID NO: 4738 - RNA, 19 nt, synthetic construct
  misc_feature 1..19: note = Description of Artificial Sequence: Synthetic oligonucleotide
  source 1..19: mol_type = other RNA
gtacgcccgcagtggtggt

SEQ ID NO: 4739 - RNA, 19 nt, synthetic construct
  misc_feature 1..19: note = Description of Artificial Sequence: Synthetic oligonucleotide
  source 1..19: mol_type = other RNA
ggtacgcccgcagtggtgg

SEQ ID NO: 4740 - RNA, 19 nt, synthetic construct
  misc_feature 1..19: note = Description of Artificial Sequence: Synthetic oligonucleotide
  source 1..19: mol_type = other RNA
aggtacgcccgcagtggtg

SEQ ID NO: 4741 - RNA, 19 nt, synthetic construct
  misc_feature 1..19: note = Description of Artificial Sequence: Synthetic oligonucleotide
  source 1..19: mol_type = other RNA
aaggtacgcccgcagtggt

SEQ ID NO: 4742 - RNA, 19 nt, synthetic construct
  misc_feature 1..19: note = Description of Artificial Sequence: Synthetic oligonucleotide
  source 1..19: mol_type = other RNA
caaggtacgcccgcagtgg

SEQ ID NO: 4743 - RNA, 19 nt, synthetic construct
  misc_feature 1..19: note = Description of Artificial Sequence: Synthetic oligonucleotide
  source 1..19: mol_type = other RNA
gcaaggtacgcccgcagtg

SEQ ID NO: 4744 - RNA, 19 nt, synthetic construct
  misc_feature 1..19: note = Description of Artificial Sequence: Synthetic oligonucleotide
  source 1..19: mol_type = other RNA
ggcaaggtacgcccgcagt

SEQ ID NO: 4745 - RNA, 19 nt, synthetic construct
  misc_feature 1..19: note = Description of Artificial Sequence: Synthetic oligonucleotide
  source 1..19: mol_type = other RNA
tggcaaggtacgcccgcag

SEQ ID NO: 4746 - RNA, 19 nt, synthetic construct
  misc_feature 1..19: note = Description of Artificial Sequence: Synthetic oligonucleotide
  source 1..19: mol_type = other RNA
ctggcaaggtacgcccgca

SEQ ID NO: 4747 - RNA, 19 nt, synthetic construct
  misc_feature 1..19: note = Description of Artificial Sequence: Synthetic oligonucleotide
  source 1..19: mol_type = other RNA
gctggcaaggtacgcccgc

SEQ ID NO: 4748 - RNA, 19 nt, synthetic construct
  misc_feature 1..19: note = Description of Artificial Sequence: Synthetic oligonucleotide
  source 1..19: mol_type = other RNA
cgctggcaaggtacgcccg

SEQ ID NO: 4749 - RNA, 19 nt, synthetic construct
  misc_feature 1..19: note = Description of Artificial Sequence: Synthetic oligonucleotide
  source 1..19: mol_type = other RNA
acgctggcaaggtacgccc

SEQ ID NO: 4750 - RNA, 19 nt, synthetic construct
  misc_feature 1..19: note = Description of Artificial Sequence: Synthetic oligonucleotide
  source 1..19: mol_type = other RNA
aacgctggcaaggtacgcc

SEQ ID NO: 4751 - RNA, 19 nt, synthetic construct
  misc_feature 1..19: note = Description of Artificial Sequence: Synthetic oligonucleotide
  source 1..19: mol_type = other RNA
caacgctggcaaggtacgc

SEQ ID NO: 4752 - RNA, 19 nt, synthetic construct
  misc_feature 1..19: note = Description of Artificial Sequence: Synthetic oligonucleotide
  source 1..19: mol_type = other RNA
ccaacgctggcaaggtacg

SEQ ID NO: 4753 - RNA, 19 nt, synthetic construct
  misc_feature 1..19: note = Description of Artificial Sequence: Synthetic oligonucleotide
  source 1..19: mol_type = other RNA
cccaacgctggcaaggtac

SEQ ID NO: 4754 - RNA, 19 nt, synthetic construct
  misc_feature 1..19: note = Description of Artificial Sequence: Synthetic oligonucleotide
  source 1..19: mol_type = other RNA
tcccaacgctggcaaggta

SEQ ID NO: 4755 - RNA, 19 nt, synthetic construct
  misc_feature 1..19: note = Description of Artificial Sequence: Synthetic oligonucleotide
  source 1..19: mol_type = other RNA
gtcccaacgctggcaaggt

SEQ ID NO: 4756 - RNA, 19 nt, synthetic construct
  misc_feature 1..19: note = Description of Artificial Sequence: Synthetic oligonucleotide
  source 1..19: mol_type = other RNA
cgtcccaacgctggcaagg

SEQ ID NO: 4757 - RNA, 19 nt, synthetic construct
  misc_feature 1..19: note = Description of Artificial Sequence: Synthetic oligonucleotide
  source 1..19: mol_type = other RNA
gcgtcccaacgctggcaag

SEQ ID NO: 4758 - RNA, 19 nt, synthetic construct
  misc_feature 1..19: note = Description of Artificial Sequence: Synthetic oligonucleotide
  source 1..19: mol_type = other RNA
cgcgtcccaacgctggcaa

SEQ ID NO: 4759 - RNA, 19 nt, synthetic construct
  misc_feature 1..19: note = Description of Artificial Sequence: Synthetic oligonucleotide
  source 1..19: mol_type = other RNA
gcgcgtcccaacgctggca

SEQ ID NO: 4760 - RNA, 19 nt, synthetic construct
  misc_feature 1..19: note = Description of Artificial Sequence: Synthetic oligonucleotide
  source 1..19: mol_type = other RNA
tgcgcgtcccaacgctggc

SEQ ID NO: 4761 - RNA, 19 nt, synthetic construct
  misc_feature 1..19: note = Description of Artificial Sequence: Synthetic oligonucleotide
  source 1..19: mol_type = other RNA
ttgcgcgtcccaacgctgg

SEQ ID NO: 4762 - RNA, 19 nt, synthetic construct
  misc_feature 1..19: note = Description of Artificial Sequence: Synthetic oligonucleotide
  source 1..19: mol_type = other RNA
tttgcgcgtcccaacgctg

SEQ ID NO: 4763 - RNA, 19 nt, synthetic construct
  misc_feature 1..19: note = Description of Artificial Sequence: Synthetic oligonucleotide
  source 1..19: mol_type = other RNA
atttgcgcgtcccaacgct

SEQ ID NO: 4764 - RNA, 19 nt, synthetic construct
  misc_feature 1..19: note = Description of Artificial Sequence: Synthetic oligonucleotide
  source 1..19: mol_type = other RNA
gatttgcgcgtcccaacgc

SEQ ID NO: 4765 - RNA, 19 nt, synthetic construct
  misc_feature 1..19: note = Description of Artificial Sequence: Synthetic oligonucleotide
  source 1..19: mol_type = other RNA
ggatttgcgcgtcccaacg

SEQ ID NO: 4766 - RNA, 19 nt, synthetic construct
  misc_feature 1..19: note = Description of Artificial Sequence: Synthetic oligonucleotide
  source 1..19: mol_type = other RNA
gggatttgcgcgtcccaac

SEQ ID NO: 4767 - RNA, 19 nt, synthetic construct
  misc_feature 1..19: note = Description of Artificial Sequence: Synthetic oligonucleotide
  source 1..19: mol_type = other RNA
cgggatttgcgcgtcccaa

SEQ ID NO: 4768 - RNA, 19 nt, synthetic construct
  misc_feature 1..19: note = Description of Artificial Sequence: Synthetic oligonucleotide
  source 1..19: mol_type = other RNA
gcgggatttgcgcgtccca

SEQ ID NO: 4769 - RNA, 19 nt, synthetic construct
  misc_feature 1..19: note = Description of Artificial Sequence: Synthetic oligonucleotide
  source 1..19: mol_type = other RNA
tgcgggatttgcgcgtccc

SEQ ID NO: 4770 - RNA, 19 nt, synthetic construct
  misc_feature 1..19: note = Description of Artificial Sequence: Synthetic oligonucleotide
  source 1..19: mol_type = other RNA
atgcgggatttgcgcgtcc

SEQ ID NO: 4771 - RNA, 19 nt, synthetic construct
  misc_feature 1..19: note = Description of Artificial Sequence: Synthetic oligonucleotide
  source 1..19: mol_type = other RNA
gatgcgggatttgcgcgtc

SEQ ID NO: 4772 - RNA, 19 nt, synthetic construct
  misc_feature 1..19: note = Description of Artificial Sequence: Synthetic oligonucleotide
  source 1..19: mol_type = other RNA
tgatgcgggatttgcgcgt

SEQ ID NO: 4773 - RNA, 19 nt, synthetic construct
  misc_feature 1..19: note = Description of Artificial Sequence: Synthetic oligonucleotide
  source 1..19: mol_type = other RNA
ctgatgcgggatttgcgcg

SEQ ID NO: 4774 - RNA, 19 nt, synthetic construct
  misc_feature 1..19: note = Description of Artificial Sequence: Synthetic oligonucleotide
  source 1..19: mol_type = other RNA
gctgatgcgggatttgcgc

SEQ ID NO: 4775 - RNA, 19 nt, synthetic construct
  misc_feature 1..19: note = Description of Artificial Sequence: Synthetic oligonucleotide
  source 1..19: mol_type = other RNA
tgctgatgcgggatttgcg

SEQ ID NO: 4776 - RNA, 19 nt, synthetic construct
  misc_feature 1..19: note = Description of Artificial Sequence: Synthetic oligonucleotide
  source 1..19: mol_type = other RNA
gtgctgatgcgggatttgc

SEQ ID NO: 4777 - RNA, 19 nt, synthetic construct
  misc_feature 1..19: note = Description of Artificial Sequence: Synthetic oligonucleotide
  source 1..19: mol_type = other RNA
ggtgctgatgcgggatttg

SEQ ID NO: 4778 - RNA, 19 nt, synthetic construct
  misc_feature 1..19: note = Description of Artificial Sequence: Synthetic oligonucleotide
  source 1..19: mol_type = other RNA
cggtgctgatgcgggattt

SEQ ID NO: 4779 - RNA, 19 nt, synthetic construct
  misc_feature 1..19: note = Description of Artificial Sequence: Synthetic oligonucleotide
  source 1..19: mol_type = other RNA
tcggtgctgatgcgggatt

SEQ ID NO: 4780 - RNA, 19 nt, synthetic construct
  misc_feature 1..19: note = Description of Artificial Sequence: Synthetic oligonucleotide
  source 1..19: mol_type = other RNA
atcggtgctgatgcgggat

SEQ ID NO: 4781 - RNA, 19 nt, synthetic construct
  misc_feature 1..19: note = Description of Artificial Sequence: Synthetic oligonucleotide
  source 1..19: mol_type = other RNA
aatcggtgctgatgcggga

SEQ ID NO: 4782 - RNA, 19 nt, synthetic construct
  misc_feature 1..19: note = Description of Artificial Sequence: Synthetic oligonucleotide
  source 1..19: mol_type = other RNA
aaatcggtgctgatgcggg

SEQ ID NO: 4783 - RNA, 19 nt, synthetic construct
  misc_feature 1..19: note = Description of Artificial Sequence: Synthetic oligonucleotide
  source 1..19: mol_type = other RNA
taaatcggtgctgatgcgg

SEQ ID NO: 4784 - RNA, 19 nt, synthetic construct
  misc_feature 1..19: note = Description of Artificial Sequence: Synthetic oligonucleotide
  source 1..19: mol_type = other RNA
gtaaatcggtgctgatgcg

SEQ ID NO: 4785 - RNA, 19 nt, synthetic construct
  misc_feature 1..19: note = Description of Artificial Sequence: Synthetic oligonucleotide
  source 1..19: mol_type = other RNA
cgtaaatcggtgctgatgc

SEQ ID NO: 4786 - RNA, 19 nt, synthetic construct
  misc_feature 1..19: note = Description of Artificial Sequence: Synthetic oligonucleotide
  source 1..19: mol_type = other RNA
gcgtaaatcggtgctgatg

SEQ ID NO: 4787 - RNA, 19 nt, synthetic construct
  misc_feature 1..19: note = Description of Artificial Sequence: Synthetic oligonucleotide
  source 1..19: mol_type = other RNA
ggcgtaaatcggtgctgat

SEQ ID NO: 4788 - RNA, 19 nt, synthetic construct
  misc_feature 1..19: note = Description of Artificial Sequence: Synthetic oligonucleotide
  source 1..19: mol_type = other RNA
tggcgtaaatcggtgctga

SEQ ID NO: 4789 - RNA, 19 nt, synthetic construct
  misc_feature 1..19: note = Description of Artificial Sequence: Synthetic oligonucleotide
  source 1..19: mol_type = other RNA
ctggcgtaaatcggtgctg

SEQ ID NO: 4790 - RNA, 19 nt, synthetic construct
  misc_feature 1..19: note = Description of Artificial Sequence: Synthetic oligonucleotide
  source 1..19: mol_type = other RNA
tctggcgtaaatcggtgct

SEQ ID NO: 4791 - RNA, 19 nt, synthetic construct
  misc_feature 1..19: note = Description of Artificial Sequence: Synthetic oligonucleotide
  source 1..19: mol_type = other RNA
ttctggcgtaaatcggtgc

SEQ ID NO: 4792 - RNA, 19 nt, synthetic construct
  misc_feature 1..19: note = Description of Artificial Sequence: Synthetic oligonucleotide
  source 1..19: mol_type = other RNA
tttctggcgtaaatcggtg

SEQ ID NO: 4793 - RNA, 19 nt, synthetic construct
  misc_feature 1..19: note = Description of Artificial Sequence: Synthetic oligonucleotide
  source 1..19: mol_type = other RNA
ttttctggcgtaaatcggt

SEQ ID NO: 4794 - RNA, 19 nt, synthetic construct
  misc_feature 1..19: note = Description of Artificial Sequence: Synthetic oligonucleotide
  source 1..19: mol_type = other RNA
tttttctggcgtaaatcgg

SEQ ID NO: 4795 - RNA, 19 nt, synthetic construct
  misc_feature 1..19: note = Description of Artificial Sequence: Synthetic oligonucleotide
  source 1..19: mol_type = other RNA
atttttctggcgtaaatcg

SEQ ID NO: 4796 - RNA, 19 nt, synthetic construct
  misc_feature 1..19: note = Description of Artificial Sequence: Synthetic oligonucleotide
  source 1..19: mol_type = other RNA
tatttttctggcgtaaatc

SEQ ID NO: 4797 - RNA, 19 nt, synthetic construct
  misc_feature 1..19: note = Description of Artificial Sequence: Synthetic oligonucleotide
  source 1..19: mol_type = other RNA
gtatttttctggcgtaaat

SEQ ID NO: 4798 - RNA, 19 nt, synthetic construct
  misc_feature 1..19: note = Description of Artificial Sequence: Synthetic oligonucleotide
  source 1..19: mol_type = other RNA
cgtatttttctggcgtaaa

SEQ ID NO: 4799 - RNA, 19 nt, synthetic construct
  misc_feature 1..19: note = Description of Artificial Sequence: Synthetic oligonucleotide
  source 1..19: mol_type = other RNA
gcgtatttttctggcgtaa

SEQ ID NO: 4800 - RNA, 19 nt, synthetic construct
  misc_feature 1..19: note = Description of Artificial Sequence: Synthetic oligonucleotide
  source 1..19: mol_type = other RNA
cgcgtatttttctggcgta

SEQ ID NO: 4801 - RNA, 19 nt, synthetic construct
  misc_feature 1..19: note = Description of Artificial Sequence: Synthetic oligonucleotide
  source 1..19: mol_type = other RNA
acgcgtatttttctggcgt

SEQ ID NO: 4802 - RNA, 19 nt, synthetic construct
  misc_feature 1..19: note = Description of Artificial Sequence: Synthetic oligonucleotide
  source 1..19: mol_type = other RNA
cacgcgtatttttctggcg

SEQ ID NO: 4803 - RNA, 19 nt, synthetic construct
  misc_feature 1..19: note = Description of Artificial Sequence: Synthetic oligonucleotide
  source 1..19: mol_type = other RNA
gcacgcgtatttttctggc

SEQ ID NO: 4804 - RNA, 19 nt, synthetic construct
  misc_feature 1..19: note = Description of Artificial Sequence: Synthetic oligonucleotide
  source 1..19: mol_type = other RNA
tgcacgcgtatttttctgg

SEQ ID NO: 4805 - RNA, 19 nt, synthetic construct
  misc_feature 1..19: note = Description of Artificial Sequence: Synthetic oligonucleotide
  source 1..19: mol_type = other RNA
ttgcacgcgtatttttctg

SEQ ID NO: 4806 - RNA, 19 nt, synthetic construct
  misc_feature 1..19: note = Description of Artificial Sequence: Synthetic oligonucleotide
  source 1..19: mol_type = other RNA
tttgcacgcgtatttttct

SEQ ID NO: 4807 - RNA, 19 nt, synthetic construct
  misc_feature 1..19: note = Description of Artificial Sequence: Synthetic oligonucleotide
  source 1..19: mol_type = other RNA
ctttgcacgcgtatttttc

SEQ ID NO: 4808 - RNA, 19 nt, synthetic construct
  misc_feature 1..19: note = Description of Artificial Sequence: Synthetic oligonucleotide
  source 1..19: mol_type = other RNA
tctttgcacgcgtattttt

SEQ ID NO: 4809 - RNA, 19 nt, synthetic construct
  misc_feature 1..19: note = Description of Artificial Sequence: Synthetic oligonucleotide
  source 1..19: mol_type = other RNA
gtctttgcacgcgtatttt

SEQ ID NO: 4810 - RNA, 19 nt, synthetic construct
  misc_feature 1..19: note = Description of Artificial Sequence: Synthetic oligonucleotide
  source 1..19: mol_type = other RNA
ggtctttgcacgcgtattt

SEQ ID NO: 4811 - RNA, 19 nt, synthetic construct
  misc_feature 1..19: note = Description of Artificial Sequence: Synthetic oligonucleotide
  source 1..19: mol_type = other RNA
aggtctttgcacgcgtatt

SEQ ID NO: 4812 - RNA, 19 nt, synthetic construct
  misc_feature 1..19: note = Description of Artificial Sequence: Synthetic oligonucleotide
  source 1..19: mol_type = other RNA
aaggtctttgcacgcgtat

SEQ ID NO: 4813 - RNA, 19 nt, synthetic construct
  misc_feature 1..19: note = Description of Artificial Sequence: Synthetic oligonucleotide
  source 1..19: mol_type = other RNA
gaaggtctttgcacgcgta

SEQ ID NO: 4814 - RNA, 19 nt, synthetic construct
  misc_feature 1..19: note = Description of Artificial Sequence: Synthetic oligonucleotide
  source 1..19: mol_type = other RNA
cgaaggtctttgcacgcgt

SEQ ID NO: 4815 - RNA, 19 nt, synthetic construct
  misc_feature 1..19: note = Description of Artificial Sequence: Synthetic oligonucleotide
  source 1..19: mol_type = other RNA
ccgaaggtctttgcacgcg

SEQ ID NO: 4816 - RNA, 19 nt, synthetic construct
  misc_feature 1..19: note = Description of Artificial Sequence: Synthetic oligonucleotide
  source 1..19: mol_type = other RNA
cccgaaggtctttgcacgc

SEQ ID NO: 4817 - RNA, 19 nt, synthetic construct
  misc_feature 1..19: note = Description of Artificial Sequence: Synthetic oligonucleotide
  source 1..19: mol_type = other RNA
tcccgaaggtctttgcacg

SEQ ID NO: 4818 - RNA, 19 nt, synthetic construct
  misc_feature 1..19: note = Description of Artificial Sequence: Synthetic oligonucleotide
  source 1..19: mol_type = other RNA
ctcccgaaggtctttgcac

SEQ ID NO: 4819 - RNA, 19 nt, synthetic construct
  misc_feature 1..19: note = Description of Artificial Sequence: Synthetic oligonucleotide
  source 1..19: mol_type = other RNA
tctcccgaaggtctttgca

SEQ ID NO: 4820 - RNA, 19 nt, synthetic construct
  misc_feature 1..19: note = Description of Artificial Sequence: Synthetic oligonucleotide
  source 1..19: mol_type = other RNA
ttctcccgaaggtctttgc

SEQ ID NO: 4821 - RNA, 19 nt, synthetic construct
  misc_feature 1..19: note = Description of Artificial Sequence: Synthetic oligonucleotide
  source 1..19: mol_type = other RNA
gttctcccgaaggtctttg

SEQ ID NO: 4822 - RNA, 19 nt, synthetic construct
  misc_feature 1..19: note = Description of Artificial Sequence: Synthetic oligonucleotide
  source 1..19: mol_type = other RNA
agttctcccgaaggtcttt

SEQ ID NO: 4823 - RNA, 19 nt, synthetic construct
  misc_feature 1..19: note = Description of Artificial Sequence: Synthetic oligonucleotide
  source 1..19: mol_type = other RNA
aagttctcccgaaggtctt

SEQ ID NO: 4824 - RNA, 19 nt, synthetic construct
  misc_feature 1..19: note = Description of Artificial Sequence: Synthetic oligonucleotide
  source 1..19: mol_type = other RNA
gaagttctcccgaaggtct

SEQ ID NO: 4825 - RNA, 19 nt, synthetic construct
  misc_feature 1..19: note = Description of Artificial Sequence: Synthetic oligonucleotide
  source 1..19: mol_type = other RNA
agaagttctcccgaaggtc

SEQ ID NO: 4826 - RNA, 19 nt, synthetic construct
  misc_feature 1..19: note = Description of Artificial Sequence: Synthetic oligonucleotide
  source 1..19: mol_type = other RNA
cagaagttctcccgaaggt

SEQ ID NO: 4827 - RNA, 19 nt, synthetic construct
  misc_feature 1..19: note = Description of Artificial Sequence: Synthetic oligonucleotide
  source 1..19: mol_type = other RNA
gcagaagttctcccgaagg

SEQ ID NO: 4828 - RNA, 19 nt, synthetic construct
  misc_feature 1..19: note = Description of Artificial Sequence: Synthetic oligonucleotide
  source 1..19: mol_type = other RNA
ggcagaagttctcccgaag

SEQ ID NO: 4829 - RNA, 19 nt, synthetic construct
  misc_feature 1..19: note = Description of Artificial Sequence: Synthetic oligonucleotide
  source 1..19: mol_type = other RNA
cggcagaagttctcccgaa

SEQ ID NO: 4830 - RNA, 19 nt, synthetic construct
  misc_feature 1..19: note = Description of Artificial Sequence: Synthetic oligonucleotide
  source 1..19: mol_type = other RNA
ccggcagaagttctcccga

SEQ ID NO: 4831 - RNA, 19 nt, synthetic construct
  misc_feature 1..19: note = Description of Artificial Sequence: Synthetic oligonucleotide
  source 1..19: mol_type = other RNA
tccggcagaagttctcccg

SEQ ID NO: 4832 - RNA, 19 nt, synthetic construct
  misc_feature 1..19: note = Description of Artificial Sequence: Synthetic oligonucleotide
  source 1..19: mol_type = other RNA
ttccggcagaagttctccc

SEQ ID NO: 4833 - RNA, 19 nt, synthetic construct
  misc_feature 1..19: note = Description of Artificial Sequence: Synthetic oligonucleotide
  source 1..19: mol_type = other RNA
gttccggcagaagttctcc

SEQ ID NO: 4834 - RNA, 19 nt, synthetic construct
  misc_feature 1..19: note = Description of Artificial Sequence: Synthetic oligonucleotide
  source 1..19: mol_type = other RNA
ggttccggcagaagttctc

SEQ ID NO: 4835 - RNA, 19 nt, synthetic construct
  misc_feature 1..19: note = Description of Artificial Sequence: Synthetic oligonucleotide
  source 1..19: mol_type = other RNA
gggttccggcagaagttct

SEQ ID NO: 4836 - RNA, 19 nt, synthetic construct
  misc_feature 1..19: note = Description of Artificial Sequence: Synthetic oligonucleotide
  source 1..19: mol_type = other RNA
ggggttccggcagaagttc

SEQ ID NO: 4837 - RNA, 19 nt, synthetic construct
  misc_feature 1..19: note = Description of Artificial Sequence: Synthetic oligonucleotide
  source 1..19: mol_type = other RNA
cggggttccggcagaagtt

SEQ ID NO: 4838 - RNA, 19 nt, synthetic construct
  misc_feature 1..19: note = Description of Artificial Sequence: Synthetic oligonucleotide
  source 1..19: mol_type = other RNA
tcggggttccggcagaagt

SEQ ID NO: 4839 - RNA, 19 nt, synthetic construct
  misc_feature 1..19: note = Description of Artificial Sequence: Synthetic oligonucleotide
  source 1..19: mol_type = other RNA
gtcggggttccggcagaag

SEQ ID NO: 4840 - RNA, 19 nt, synthetic construct
  misc_feature 1..19: note = Description of Artificial Sequence: Synthetic oligonucleotide
  source 1..19: mol_type = other RNA
cgtcggggttccggcagaa

SEQ ID NO: 4841 - RNA, 19 nt, synthetic construct
  misc_feature 1..19: note = Description of Artificial Sequence: Synthetic oligonucleotide
  source 1..19: mol_type = other RNA
ccgtcggggttccggcaga

SEQ ID NO: 4842 - RNA, 19 nt, synthetic construct
  misc_feature 1..19: note = Description of Artificial Sequence: Synthetic oligonucleotide
  source 1..19: mol_type = other RNA
gccgtcggggttccggcag

SEQ ID NO: 4843 - RNA, 19 nt, synthetic construct
  misc_feature 1..19: note = Description of Artificial Sequence: Synthetic oligonucleotide
  source 1..19: mol_type = other RNA
agccgtcggggttccggca

SEQ ID NO: 4844 - RNA, 19 nt, synthetic construct
  misc_feature 1..19: note = Description of Artificial Sequence: Synthetic oligonucleotide
  source 1..19: mol_type = other RNA
gagccgtcggggttccggc

SEQ ID NO: 4845 - RNA, 19 nt, synthetic construct
  misc_feature 1..19: note = Description of Artificial Sequence: Synthetic oligonucleotide
  source 1..19: mol_type = other RNA
tgagccgtcggggttccgg

SEQ ID NO: 4846 - RNA, 19 nt, synthetic construct
  misc_feature 1..19: note = Description of Artificial Sequence: Synthetic oligonucleotide
  source 1..19: mol_type = other RNA
ctgagccgtcggggttccg

SEQ ID NO: 4847 - RNA, 19 nt, synthetic construct
  misc_feature 1..19: note = Description of Artificial Sequence: Synthetic oligonucleotide
  source 1..19: mol_type = other RNA
tctgagccgtcggggttcc

SEQ ID NO: 4848 - RNA, 19 nt, synthetic construct
  misc_feature 1..19: note = Description of Artificial Sequence: Synthetic oligonucleotide
  source 1..19: mol_type = other RNA
ctctgagccgtcggggttc

SEQ ID NO: 4849 - RNA, 19 nt, synthetic construct
  misc_feature 1..19: note = Description of Artificial Sequence: Synthetic oligonucleotide
  source 1..19: mol_type = other RNA
cctctgagccgtcggggtt

SEQ ID NO: 4850 - RNA, 19 nt, synthetic construct
  misc_feature 1..19: note = Description of Artificial Sequence: Synthetic oligonucleotide
  source 1..19: mol_type = other RNA
gcctctgagccgtcggggt

SEQ ID NO: 4851 - RNA, 19 nt, synthetic construct
  misc_feature 1..19: note = Description of Artificial Sequence: Synthetic oligonucleotide
  source 1..19: mol_type = other RNA
cgcctctgagccgtcgggg

SEQ ID NO: 4852 - RNA, 19 nt, synthetic construct
  misc_feature 1..19: note = Description of Artificial Sequence: Synthetic oligonucleotide
  source 1..19: mol_type = other RNA
gcgcctctgagccgtcggg

SEQ ID NO: 4853 - RNA, 19 nt, synthetic construct
  misc_feature 1..19: note = Description of Artificial Sequence: Synthetic oligonucleotide
  source 1..19: mol_type = other RNA
ggcgcctctgagccgtcgg

SEQ ID NO: 4854 - RNA, 19 nt, synthetic construct
  misc_feature 1..19: note = Description of Artificial Sequence: Synthetic oligonucleotide
  source 1..19: mol_type = other RNA
gggcgcctctgagccgtcg

SEQ ID NO: 4855 - RNA, 19 nt, synthetic construct
  misc_feature 1..19: note = Description of Artificial Sequence: Synthetic oligonucleotide
  source 1..19: mol_type = other RNA
agggcgcctctgagccgtc

SEQ ID NO: 4856 - RNA, 19 nt, synthetic construct
  misc_feature 1..19: note = Description of Artificial Sequence: Synthetic oligonucleotide
  source 1..19: mol_type = other RNA
cagggcgcctctgagccgt

SEQ ID NO: 4857 - RNA, 19 nt, synthetic construct
  misc_feature 1..19: note = Description of Artificial Sequence: Synthetic oligonucleotide
  source 1..19: mol_type = other RNA
ccagggcgcctctgagccg

SEQ ID NO: 4858 - RNA, 19 nt, synthetic construct
  misc_feature 1..19: note = Description of Artificial Sequence: Synthetic oligonucleotide
  source 1..19: mol_type = other RNA
accagggcgcctctgagcc

SEQ ID NO: 4859 - RNA, 19 nt, synthetic construct
  misc_feature 1..19: note = Description of Artificial Sequence: Synthetic oligonucleotide
  source 1..19: mol_type = other RNA
caccagggcgcctctgagc

SEQ ID NO: 4860 - RNA, 19 nt, synthetic construct
  misc_feature 1..19: note = Description of Artificial Sequence: Synthetic oligonucleotide
  source 1..19: mol_type = other RNA
gcaccagggcgcctctgag

SEQ ID NO: 4861 - RNA, 19 nt, synthetic construct
  misc_feature 1..19: note = Description of Artificial Sequence: Synthetic oligonucleotide
  source 1..19: mol_type = other RNA
agcaccagggcgcctctga

SEQ ID NO: 4862 - RNA, 19 nt, synthetic construct
  misc_feature 1..19: note = Description of Artificial Sequence: Synthetic oligonucleotide
  source 1..19: mol_type = other RNA
aagcaccagggcgcctctg

SEQ ID NO: 4863 - RNA, 19 nt, synthetic construct
  misc_feature 1..19: note = Description of Artificial Sequence: Synthetic oligonucleotide
  source 1..19: mol_type = other RNA
gaagcaccagggcgcctct

SEQ ID NO: 4864 - RNA, 19 nt, synthetic construct
  misc_feature 1..19: note = Description of Artificial Sequence: Synthetic oligonucleotide
  source 1..19: mol_type = other RNA
tgaagcaccagggcgcctc

SEQ ID NO: 4865 - RNA, 19 nt, synthetic construct
  misc_feature 1..19: note = Description of Artificial Sequence: Synthetic oligonucleotide
  source 1..19: mol_type = other RNA
gtgaagcaccagggcgcct

SEQ ID NO: 4866 - RNA, 19 nt, synthetic construct
  misc_feature 1..19: note = Description of Artificial Sequence: Synthetic oligonucleotide
  source 1..19: mol_type = other RNA
tgtgaagcaccagggcgcc

SEQ ID NO: 4867 - RNA, 19 nt, synthetic construct
  misc_feature 1..19: note = Description of Artificial Sequence: Synthetic oligonucleotide
  source 1..19: mol_type = other RNA
gtgtgaagcaccagggcgc

SEQ ID NO: 4868 - RNA, 19 nt, synthetic construct
  misc_feature 1..19: note = Description of Artificial Sequence: Synthetic oligonucleotide
  source 1..19: mol_type = other RNA
agtgtgaagcaccagggcg

SEQ ID NO: 4869 - RNA, 19 nt, synthetic construct
  misc_feature 1..19: note = Description of Artificial Sequence: Synthetic oligonucleotide
  source 1..19: mol_type = other RNA
cagtgtgaagcaccagggc

SEQ ID NO: 4870 - RNA, 19 nt, synthetic construct
  misc_feature 1..19: note = Description of Artificial Sequence: Synthetic oligonucleotide
  source 1..19: mol_type = other RNA
gcagtgtgaagcaccaggg

SEQ ID NO: 4871 - RNA, 19 nt, synthetic construct
  misc_feature 1..19: note = Description of Artificial Sequence: Synthetic oligonucleotide
  source 1..19: mol_type = other RNA
cgcagtgtgaagcaccagg

SEQ ID NO: 4872 - RNA, 19 nt, synthetic construct
  misc_feature 1..19: note = Description of Artificial Sequence: Synthetic oligonucleotide
  source 1..19: mol_type = other RNA
ccgcagtgtgaagcaccag

SEQ ID NO: 4873 - RNA, 19 nt, synthetic construct
  misc_feature 1..19: note = Description of Artificial Sequence: Synthetic oligonucleotide
  source 1..19: mol_type = other RNA
gccgcagtgtgaagcacca

SEQ ID NO: 4874 - RNA, 19 nt, synthetic construct
  misc_feature 1..19: note = Description of Artificial Sequence: Synthetic oligonucleotide
  source 1..19: mol_type = other RNA
ggccgcagtgtgaagcacc

SEQ ID NO: 4875 - RNA, 19 nt, synthetic construct
  misc_feature 1..19: note = Description of Artificial Sequence: Synthetic oligonucleotide
  source 1..19: mol_type = other RNA
gggccgcagtgtgaagcac

SEQ ID NO: 4876 - RNA, 19 nt, synthetic construct
  misc_feature 1..19: note = Description of Artificial Sequence: Synthetic oligonucleotide
  source 1..19: mol_type = other RNA
cgggccgcagtgtgaagca

SEQ ID NO: 4877 - RNA, 19 nt, synthetic construct
  misc_feature 1..19: note = Description of Artificial Sequence: Synthetic oligonucleotide
  source 1..19: mol_type = other RNA
ccgggccgcagtgtgaagc

SEQ ID NO: 4878 - RNA, 19 nt, synthetic construct
  misc_feature 1..19: note = Description of Artificial Sequence: Synthetic oligonucleotide
  source 1..19: mol_type = other RNA
gccgggccgcagtgtgaag

SEQ ID NO: 4879 - RNA, 19 nt, synthetic construct
  misc_feature 1..19: note = Description of Artificial Sequence: Synthetic oligonucleotide
  source 1..19: mol_type = other RNA
tgccgggccgcagtgtgaa

SEQ ID NO: 4880 - RNA, 19 nt, synthetic construct
  misc_feature 1..19: note = Description of Artificial Sequence: Synthetic oligonucleotide
  source 1..19: mol_type = other RNA
atgccgggccgcagtgtga

SEQ ID NO: 4881 - RNA, 19 nt, synthetic construct
  misc_feature 1..19: note = Description of Artificial Sequence: Synthetic oligonucleotide
  source 1..19: mol_type = other RNA
catgccgggccgcagtgtg

SEQ ID NO: 4882 - RNA, 19 nt, synthetic construct
  misc_feature 1..19: note = Description of Artificial Sequence: Synthetic oligonucleotide
  source 1..19: mol_type = other RNA
gcatgccgggccgcagtgt

SEQ ID NO: 4883 - RNA, 19 nt, synthetic construct
  misc_feature 1..19: note = Description of Artificial Sequence: Synthetic oligonucleotide
  source 1..19: mol_type = other RNA
cgcatgccgggccgcagtg

SEQ ID NO: 4884 - RNA, 19 nt, synthetic construct
  misc_feature 1..19: note = Description of Artificial Sequence: Synthetic oligonucleotide
  source 1..19: mol_type = other RNA
gcgcatgccgggccgcagt

SEQ ID NO: 4885 - RNA, 19 nt, synthetic construct
  misc_feature 1..19: note = Description of Artificial Sequence: Synthetic oligonucleotide
  source 1..19: mol_type = other RNA
cgcgcatgccgggccgcag

SEQ ID NO: 4886 - RNA, 19 nt, synthetic construct
  misc_feature 1..19: note = Description of Artificial Sequence: Synthetic oligonucleotide
  source 1..19: mol_type = other RNA
gcgcgcatgccgggccgca

SEQ ID NO: 4887 - RNA, 19 nt, synthetic construct
  misc_feature 1..19: note = Description of Artificial Sequence: Synthetic oligonucleotide
  source 1..19: mol_type = other RNA
cgcgcgcatgccgggccgc

SEQ ID NO: 4888 - RNA, 19 nt, synthetic construct
  misc_feature 1..19: note = Description of Artificial Sequence: Synthetic oligonucleotide
  source 1..19: mol_type = other RNA
ccgcgcgcatgccgggccg

SEQ ID NO: 4889 - RNA, 19 nt, synthetic construct
  misc_feature 1..19: note = Description of Artificial Sequence: Synthetic oligonucleotide
  source 1..19: mol_type = other RNA
gccgcgcgcatgccgggcc

SEQ ID NO: 4890 - RNA, 19 nt, synthetic construct
  misc_feature 1..19: note = Description of Artificial Sequence: Synthetic oligonucleotide
  source 1..19: mol_type = other RNA
ggccgcgcgcatgccgggc

SEQ ID NO: 4891 - RNA, 19 nt, synthetic construct
  misc_feature 1..19: note = Description of Artificial Sequence: Synthetic oligonucleotide
  source 1..19: mol_type = other RNA
aggccgcgcgcatgccggg

SEQ ID NO: 4892 - RNA, 19 nt, synthetic construct
  misc_feature 1..19: note = Description of Artificial Sequence: Synthetic oligonucleotide
  source 1..19: mol_type = other RNA
aaggccgcgcgcatgccgg

SEQ ID NO: 4893 - RNA, 19 nt, synthetic construct
  misc_feature 1..19: note = Description of Artificial Sequence: Synthetic oligonucleotide
  source 1..19: mol_type = other RNA
aaaggccgcgcgcatgccg

SEQ ID NO: 4894 - RNA, 19 nt, synthetic construct
  misc_feature 1..19: note = Description of Artificial Sequence: Synthetic oligonucleotide
  source 1..19: mol_type = other RNA
aaaaggccgcgcgcatgcc

SEQ ID NO: 4895 - RNA, 19 nt, synthetic construct
  misc_feature 1..19: note = Description of Artificial Sequence: Synthetic oligonucleotide
  source 1..19: mol_type = other RNA
caaaaggccgcgcgcatgc

SEQ ID NO: 4896 - RNA, 19 nt, synthetic construct
  misc_feature 1..19: note = Description of Artificial Sequence: Synthetic oligonucleotide
  source 1..19: mol_type = other RNA
gcaaaaggccgcgcgcatg

SEQ ID NO: 4897 - RNA, 19 nt, synthetic construct
  misc_feature 1..19: note = Description of Artificial Sequence: Synthetic oligonucleotide
  source 1..19: mol_type = other RNA
agcaaaaggccgcgcgcat

SEQ ID NO: 4898 - RNA, 19 nt, synthetic construct
  misc_feature 1..19: note = Description of Artificial Sequence: Synthetic oligonucleotide
  source 1..19: mol_type = other RNA
tagcaaaaggccgcgcgca

SEQ ID NO: 4899 - RNA, 19 nt, synthetic construct
  misc_feature 1..19: note = Description of Artificial Sequence: Synthetic oligonucleotide
  source 1..19: mol_type = other RNA
gtagcaaaaggccgcgcgc

SEQ ID NO: 4900 - RNA, 19 nt, synthetic construct
  misc_feature 1..19: note = Description of Artificial Sequence: Synthetic oligonucleotide
  source 1..19: mol_type = other RNA
ggtagcaaaaggccgcgcg

SEQ ID NO: 4901 - RNA, 19 nt, synthetic construct
  misc_feature 1..19: note = Description of Artificial Sequence: Synthetic oligonucleotide
  source 1..19: mol_type = other RNA
tggtagcaaaaggccgcgc

SEQ ID NO: 4902 - RNA, 19 nt, synthetic construct
  misc_feature 1..19: note = Description of Artificial Sequence: Synthetic oligonucleotide
  source 1..19: mol_type = other RNA
ctggtagcaaaaggccgcg

SEQ ID NO: 4903 - RNA, 19 nt, synthetic construct
  misc_feature 1..19: note = Description of Artificial Sequence: Synthetic oligonucleotide
  source 1..19: mol_type = other RNA
tctggtagcaaaaggccgc

SEQ ID NO: 4904 - RNA, 19 nt, synthetic construct
  misc_feature 1..19: note = Description of Artificial Sequence: Synthetic oligonucleotide
  source 1..19: mol_type = other RNA
atctggtagcaaaaggccg

SEQ ID NO: 4905 - RNA, 19 nt, synthetic construct
  misc_feature 1..19: note = Description of Artificial Sequence: Synthetic oligonucleotide
  source 1..19: mol_type = other RNA
gatctggtagcaaaaggcc

SEQ ID NO: 4906 - RNA, 19 nt, synthetic construct
  misc_feature 1..19: note = Description of Artificial Sequence: Synthetic oligonucleotide
  source 1..19: mol_type = other RNA
ggatctggtagcaaaaggc

SEQ ID NO: 4907 - RNA, 19 nt, synthetic construct
  misc_feature 1..19: note = Description of Artificial Sequence: Synthetic oligonucleotide
  source 1..19: mol_type = other RNA
cggatctggtagcaaaagg

SEQ ID NO: 4908 - RNA, 19 nt, synthetic construct
  misc_feature 1..19: note = Description of Artificial Sequence: Synthetic oligonucleotide
  source 1..19: mol_type = other RNA
ccggatctggtagcaaaag

SEQ ID NO: 4909 - RNA, 19 nt, synthetic construct
  misc_feature 1..19: note = Description of Artificial Sequence: Synthetic oligonucleotide
  source 1..19: mol_type = other RNA
gccggatctggtagcaaaa

SEQ ID NO: 4910 - RNA, 19 nt, synthetic construct
  misc_feature 1..19: note = Description of Artificial Sequence: Synthetic oligonucleotide
  source 1..19: mol_type = other RNA
cgccggatctggtagcaaa

SEQ ID NO: 4911 - RNA, 19 nt, synthetic construct
  misc_feature 1..19: note = Description of Artificial Sequence: Synthetic oligonucleotide
  source 1..19: mol_type = other RNA
acgccggatctggtagcaa

SEQ ID NO: 4912 - RNA, 19 nt, synthetic construct
  misc_feature 1..19: note = Description of Artificial Sequence: Synthetic oligonucleotide
  source 1..19: mol_type = other RNA
aacgccggatctggtagca

SEQ ID NO: 4913 - RNA, 19 nt, synthetic construct
  misc_feature 1..19: note = Description of Artificial Sequence: Synthetic oligonucleotide
  source 1..19: mol_type = other RNA
caacgccggatctggtagc

SEQ ID NO: 4914 - RNA, 19 nt, synthetic construct
  misc_feature 1..19: note = Description of Artificial Sequence: Synthetic oligonucleotide
  source 1..19: mol_type = other RNA
acaacgccggatctggtag

SEQ ID NO: 4915 - RNA, 19 nt, synthetic construct
  misc_feature 1..19: note = Description of Artificial Sequence: Synthetic oligonucleotide
  source 1..19: mol_type = other RNA
tacaacgccggatctggta

SEQ ID NO: 4916 - RNA, 19 nt, synthetic construct
  misc_feature 1..19: note = Description of Artificial Sequence: Synthetic oligonucleotide
  source 1..19: mol_type = other RNA
gtacaacgccggatctggt

SEQ ID NO: 4917 - RNA, 19 nt, synthetic construct
  misc_feature 1..19: note = Description of Artificial Sequence: Synthetic oligonucleotide
  source 1..19: mol_type = other RNA
tgtacaacgccggatctgg

SEQ ID NO: 4918 - RNA, 19 nt, synthetic construct
  misc_feature 1..19: note = Description of Artificial Sequence: Synthetic oligonucleotide
  source 1..19: mol_type = other RNA
ctgtacaacgccggatctg

SEQ ID NO: 4919 - RNA, 19 nt, synthetic construct
  misc_feature 1..19: note = Description of Artificial Sequence: Synthetic oligonucleotide
  source 1..19: mol_type = other RNA
tctgtacaacgccggatct

SEQ ID NO: 4920 - RNA, 19 nt, synthetic construct
  misc_feature 1..19: note = Description of Artificial Sequence: Synthetic oligonucleotide
  source 1..19: mol_type = other RNA
gtctgtacaacgccggatc

SEQ ID NO: 4921 - RNA, 19 nt, synthetic construct
  misc_feature 1..19: note = Description of Artificial Sequence: Synthetic oligonucleotide
  source 1..19: mol_type = other RNA
cgtctgtacaacgccggat

SEQ ID NO: 4922 - RNA, 19 nt, synthetic construct
  misc_feature 1..19: note = Description of Artificial Sequence: Synthetic oligonucleotide
  source 1..19: mol_type = other RNA
tcgtctgtacaacgccgga

SEQ ID NO: 4923 - RNA, 19 nt, synthetic construct
  misc_feature 1..19: note = Description of Artificial Sequence: Synthetic oligonucleotide
  source 1..19: mol_type = other RNA
gtcgtctgtacaacgccgg

SEQ ID NO: 4924 - RNA, 19 nt, synthetic construct
  misc_feature 1..19: note = Description of Artificial Sequence: Synthetic oligonucleotide
  source 1..19: mol_type = other RNA
cgtcgtctgtacaacgccg

SEQ ID NO: 4925 - RNA, 19 nt, synthetic construct
  misc_feature 1..19: note = Description of Artificial Sequence: Synthetic oligonucleotide
  source 1..19: mol_type = other RNA
acgtcgtctgtacaacgcc

SEQ ID NO: 4926 - RNA, 19 nt, synthetic construct
  misc_feature 1..19: note = Description of Artificial Sequence: Synthetic oligonucleotide
  source 1..19: mol_type = other RNA
cacgtcgtctgtacaacgc

SEQ ID NO: 4927 - RNA, 19 nt, synthetic construct
  misc_feature 1..19: note = Description of Artificial Sequence: Synthetic oligonucleotide
  source 1..19: mol_type = other RNA
gcacgtcgtctgtacaacg

SEQ ID NO: 4928 - RNA, 19 nt, synthetic construct
  misc_feature 1..19: note = Description of Artificial Sequence: Synthetic oligonucleotide
  source 1..19: mol_type = other RNA
cgcacgtcgtctgtacaac

SEQ ID NO: 4929 - RNA, 19 nt, synthetic construct
  misc_feature 1..19: note = Description of Artificial Sequence: Synthetic oligonucleotide
  source 1..19: mol_type = other RNA
ccgcacgtcgtctgtacaa

SEQ ID NO: 4930 - RNA, 19 nt, synthetic construct
  misc_feature 1..19: note = Description of Artificial Sequence: Synthetic oligonucleotide
  source 1..19: mol_type = other RNA
gccgcacgtcgtctgtaca

SEQ ID NO: 4931 - RNA, 19 nt, synthetic construct
  misc_feature 1..19: note = Description of Artificial Sequence: Synthetic oligonucleotide
  source 1..19: mol_type = other RNA
ggccgcacgtcgtctgtac

SEQ ID NO: 4932 - RNA, 19 nt, synthetic construct
  misc_feature 1..19: note = Description of Artificial Sequence: Synthetic oligonucleotide
  source 1..19: mol_type = other RNA
gggccgcacgtcgtctgta

SEQ ID NO: 4933 - RNA, 19 nt, synthetic construct
  misc_feature 1..19: note = Description of Artificial Sequence: Synthetic oligonucleotide
  source 1..19: mol_type = other RNA
ggggccgcacgtcgtctgt

SEQ ID NO: 4934 - RNA, 19 nt, synthetic construct
  misc_feature 1..19: note = Description of Artificial Sequence: Synthetic oligonucleotide
  source 1..19: mol_type = other RNA
tggggccgcacgtcgtctg

SEQ ID NO: 4935 - RNA, 19 nt, synthetic construct
  misc_feature 1..19: note = Description of Artificial Sequence: Synthetic oligonucleotide
  source 1..19: mol_type = other RNA
ctggggccgcacgtcgtct

SEQ ID NO: 4936 - RNA, 19 nt, synthetic construct
  misc_feature 1..19: note = Description of Artificial Sequence: Synthetic oligonucleotide
  source 1..19: mol_type = other RNA
cctggggccgcacgtcgtc

SEQ ID NO: 4937 - RNA, 19 nt, synthetic construct
  misc_feature 1..19: note = Description of Artificial Sequence: Synthetic oligonucleotide
  source 1..19: mol_type = other RNA
tcctggggccgcacgtcgt

SEQ ID NO: 4938 - RNA, 19 nt, synthetic construct
  misc_feature 1..19: note = Description of Artificial Sequence: Synthetic oligonucleotide
  source 1..19: mol_type = other RNA
gtcctggggccgcacgtcg

SEQ ID NO: 4939 - RNA, 19 nt, synthetic construct
  misc_feature 1..19: note = Description of Artificial Sequence: Synthetic oligonucleotide
  source 1..19: mol_type = other RNA
agtcctggggccgcacgtc

SEQ ID NO: 4940 - RNA, 19 nt, synthetic construct
  misc_feature 1..19: note = Description of Artificial Sequence: Synthetic oligonucleotide
  source 1..19: mol_type = other RNA
cagtcctggggccgcacgt

SEQ ID NO: 4941 - RNA, 19 nt, synthetic construct
  misc_feature 1..19: note = Description of Artificial Sequence: Synthetic oligonucleotide
  source 1..19: mol_type = other RNA
gcagtcctggggccgcacg

SEQ ID NO: 4942 - RNA, 19 nt, synthetic construct
  misc_feature 1..19: note = Description of Artificial Sequence: Synthetic oligonucleotide
  source 1..19: mol_type = other RNA
agcagtcctggggccgcac

SEQ ID NO: 4943 - RNA, 19 nt, synthetic construct
  misc_feature 1..19: note = Description of Artificial Sequence: Synthetic oligonucleotide
  source 1..19: mol_type = other RNA
tagcagtcctggggccgca

SEQ ID NO: 4944 - RNA, 19 nt, synthetic construct
  misc_feature 1..19: note = Description of Artificial Sequence: Synthetic oligonucleotide
  source 1..19: mol_type = other RNA
gtagcagtcctggggccgc

SEQ ID NO: 4945 - RNA, 19 nt, synthetic construct
  misc_feature 1..19: note = Description of Artificial Sequence: Synthetic oligonucleotide
  source 1..19: mol_type = other RNA
ggtagcagtcctggggccg

SEQ ID NO: 4946 - RNA, 19 nt, synthetic construct
  misc_feature 1..19: note = Description of Artificial Sequence: Synthetic oligonucleotide
  source 1..19: mol_type = other RNA
tggtagcagtcctggggcc

SEQ ID NO: 4947 - RNA, 19 nt, synthetic construct
  misc_feature 1..19: note = Description of Artificial Sequence: Synthetic oligonucleotide
  source 1..19: mol_type = other RNA
gtggtagcagtcctggggc

SEQ ID NO: 4948 - RNA, 19 nt, synthetic construct
  misc_feature 1..19: note = Description of Artificial Sequence: Synthetic oligonucleotide
  source 1..19: mol_type = other RNA
cgtggtagcagtcctgggg

SEQ ID NO: 4949 - RNA, 19 nt, synthetic construct
  misc_feature 1..19: note = Description of Artificial Sequence: Synthetic oligonucleotide
  source 1..19: mol_type = other RNA
ccgtggtagcagtcctggg

SEQ ID NO: 4950 - RNA, 19 nt, synthetic construct
  misc_feature 1..19: note = Description of Artificial Sequence: Synthetic oligonucleotide
  source 1..19: mol_type = other RNA
gccgtggtagcagtcctgg

SEQ ID NO: 4951 - RNA, 19 nt, synthetic construct
  misc_feature 1..19: note = Description of Artificial Sequence: Synthetic oligonucleotide
  source 1..19: mol_type = other RNA
cgccgtggtagcagtcctg

SEQ ID NO: 4952 - RNA, 19 nt, synthetic construct
  misc_feature 1..19: note = Description of Artificial Sequence: Synthetic oligonucleotide
  source 1..19: mol_type = other RNA
gcgccgtggtagcagtcct

SEQ ID NO: 4953 - RNA, 19 nt, synthetic construct
  misc_feature 1..19: note = Description of Artificial Sequence: Synthetic oligonucleotide
  source 1..19: mol_type = other RNA
tgcgccgtggtagcagtcc

SEQ ID NO: 4954 - RNA, 19 nt, synthetic construct
  misc_feature 1..19: note = Description of Artificial Sequence: Synthetic oligonucleotide
  source 1..19: mol_type = other RNA
ctgcgccgtggtagcagtc

SEQ ID NO: 4955 - RNA, 19 nt, synthetic construct
  misc_feature 1..19: note = Description of Artificial Sequence: Synthetic oligonucleotide
  source 1..19: mol_type = other RNA
cctgcgccgtggtagcagt

SEQ ID NO: 4956 - RNA, 19 nt, synthetic construct
  misc_feature 1..19: note = Description of Artificial Sequence: Synthetic oligonucleotide
  source 1..19: mol_type = other RNA
ccctgcgccgtggtagcag

SEQ ID NO: 4957 - RNA, 19 nt, synthetic construct
  misc_feature 1..19: note = Description of Artificial Sequence: Synthetic oligonucleotide
  source 1..19: mol_type = other RNA
cccctgcgccgtggtagca

SEQ ID NO: 4958 - RNA, 19 nt, synthetic construct
  misc_feature 1..19: note = Description of Artificial Sequence: Synthetic oligonucleotide
  source 1..19: mol_type = other RNA
tcccctgcgccgtggtagc

SEQ ID NO: 4959 - RNA, 19 nt, synthetic construct
  misc_feature 1..19: note = Description of Artificial Sequence: Synthetic oligonucleotide
  source 1..19: mol_type = other RNA
ctcccctgcgccgtggtag

SEQ ID NO: 4960 - RNA, 19 nt, synthetic construct
  misc_feature 1..19: note = Description of Artificial Sequence: Synthetic oligonucleotide
  source 1..19: mol_type = other RNA
gctcccctgcgccgtggta

SEQ ID NO: 4961 - RNA, 19 nt, synthetic construct
  misc_feature 1..19: note = Description of Artificial Sequence: Synthetic oligonucleotide
  source 1..19: mol_type = other RNA
tgctcccctgcgccgtggt

SEQ ID NO: 4962 - RNA, 19 nt, synthetic construct
  misc_feature 1..19: note = Description of Artificial Sequence: Synthetic oligonucleotide
  source 1..19: mol_type = other RNA
ctgctcccctgcgccgtgg

SEQ ID NO: 4963 - RNA, 19 nt, synthetic construct
  misc_feature 1..19: note = Description of Artificial Sequence: Synthetic oligonucleotide
  source 1..19: mol_type = other RNA
actgctcccctgcgccgtg

SEQ ID NO: 4964 - RNA, 19 nt, synthetic construct
  misc_feature 1..19: note = Description of Artificial Sequence: Synthetic oligonucleotide
  source 1..19: mol_type = other RNA
tactgctcccctgcgccgt

SEQ ID NO: 4965 - RNA, 19 nt, synthetic construct
  misc_feature 1..19: note = Description of Artificial Sequence: Synthetic oligonucleotide
  source 1..19: mol_type = other RNA
gtactgctcccctgcgccg

SEQ ID NO: 4966 - RNA, 19 nt, synthetic construct
  misc_feature 1..19: note = Description of Artificial Sequence: Synthetic oligonucleotide
  source 1..19: mol_type = other RNA
ggtactgctcccctgcgcc

SEQ ID NO: 4967 - RNA, 19 nt, synthetic construct
  misc_feature 1..19: note = Description of Artificial Sequence: Synthetic oligonucleotide
  source 1..19: mol_type = other RNA
cggtactgctcccctgcgc

SEQ ID NO: 4968 - RNA, 19 nt, synthetic construct
  misc_feature 1..19: note = Description of Artificial Sequence: Synthetic oligonucleotide
  source 1..19: mol_type = other RNA
gcggtactgctcccctgcg

SEQ ID NO: 4969 - RNA, 19 nt, synthetic construct
  misc_feature 1..19: note = Description of Artificial Sequence: Synthetic oligonucleotide
  source 1..19: mol_type = other RNA
cgcggtactgctcccctgc

SEQ ID NO: 4970 - RNA, 19 nt, synthetic construct
  misc_feature 1..19: note = Description of Artificial Sequence: Synthetic oligonucleotide
  source 1..19: mol_type = other RNA
ccgcggtactgctcccctg

SEQ ID NO: 4971 - RNA, 19 nt, synthetic construct
  misc_feature 1..19: note = Description of Artificial Sequence: Synthetic oligonucleotide
  source 1..19: mol_type = other RNA
gccgcggtactgctcccct

SEQ ID NO: 4972 - RNA, 19 nt, synthetic construct
  misc_feature 1..19: note = Description of Artificial Sequence: Synthetic oligonucleotide
  source 1..19: mol_type = other RNA
tgccgcggtactgctcccc

SEQ ID NO: 4973 - RNA, 19 nt, synthetic construct
  misc_feature 1..19: note = Description of Artificial Sequence: Synthetic oligonucleotide
  source 1..19: mol_type = other RNA
gtgccgcggtactgctccc

SEQ ID NO: 4974 - RNA, 19 nt, synthetic construct
  misc_feature 1..19: note = Description of Artificial Sequence: Synthetic oligonucleotide
  source 1..19: mol_type = other RNA
cgtgccgcggtactgctcc

SEQ ID NO: 4975 - RNA, 19 nt, synthetic construct
  misc_feature 1..19: note = Description of Artificial Sequence: Synthetic oligonucleotide
  source 1..19: mol_type = other RNA
ccgtgccgcggtactgctc

SEQ ID NO: 4976 - RNA, 19 nt, synthetic construct
  misc_feature 1..19: note = Description of Artificial Sequence: Synthetic oligonucleotide
  source 1..19: mol_type = other RNA
accgtgccgcggtactgct

SEQ ID NO: 4977 - RNA, 19 nt, synthetic construct
  misc_feature 1..19: note = Description of Artificial Sequence: Synthetic oligonucleotide
  source 1..19: mol_type = other RNA
gaccgtgccgcggtactgc

SEQ ID NO: 4978 - RNA, 19 nt, synthetic construct
  misc_feature 1..19: note = Description of Artificial Sequence: Synthetic oligonucleotide
  source 1..19: mol_type = other RNA
tgaccgtgccgcggtactg

SEQ ID NO: 4979 - RNA, 19 nt, synthetic construct
  misc_feature 1..19: note = Description of Artificial Sequence: Synthetic oligonucleotide
  source 1..19: mol_type = other RNA
ctgaccgtgccgcggtact

SEQ ID NO: 4980 - RNA, 19 nt, synthetic construct
  misc_feature 1..19: note = Description of Artificial Sequence: Synthetic oligonucleotide
  source 1..19: mol_type = other RNA
gctgaccgtgccgcggtac

SEQ ID NO: 4981 - RNA, 19 nt, synthetic construct
  misc_feature 1..19: note = Description of Artificial Sequence: Synthetic oligonucleotide
  source 1..19: mol_type = other RNA
tgctgaccgtgccgcggta

SEQ ID NO: 4982 - RNA, 19 nt, synthetic construct
  misc_feature 1..19: note = Description of Artificial Sequence: Synthetic oligonucleotide
  source 1..19: mol_type = other RNA
ttgctgaccgtgccgcggt

SEQ ID NO: 4983 - RNA, 19 nt, synthetic construct
  misc_feature 1..19: note = Description of Artificial Sequence: Synthetic oligonucleotide
  source 1..19: mol_type = other RNA
cttgctgaccgtgccgcgg

SEQ ID NO: 4984 - RNA, 19 nt, synthetic construct
  misc_feature 1..19: note = Description of Artificial Sequence: Synthetic oligonucleotide
  source 1..19: mol_type = other RNA
tcttgctgaccgtgccgcg

SEQ ID NO: 4985 - RNA, 19 nt, synthetic construct
  misc_feature 1..19: note = Description of Artificial Sequence: Synthetic oligonucleotide
  source 1..19: mol_type = other RNA
gtcttgctgaccgtgccgc

SEQ ID NO: 4986 - RNA, 19 nt, synthetic construct
  misc_feature 1..19: note = Description of Artificial Sequence: Synthetic oligonucleotide
  source 1..19: mol_type = other RNA
ggtcttgctgaccgtgccg

SEQ ID NO: 4987 - RNA, 19 nt, synthetic construct
  misc_feature 1..19: note = Description of Artificial Sequence: Synthetic oligonucleotide
  source 1..19: mol_type = other RNA
gggtcttgctgaccgtgcc

SEQ ID NO: 4988 - RNA, 19 nt, synthetic construct
  misc_feature 1..19: note = Description of Artificial Sequence: Synthetic oligonucleotide
  source 1..19: mol_type = other RNA
cgggtcttgctgaccgtgc

SEQ ID NO: 4989 - RNA, 19 nt, synthetic construct
  misc_feature 1..19: note = Description of Artificial Sequence: Synthetic oligonucleotide
  source 1..19: mol_type = other RNA
gcgggtcttgctgaccgtg

SEQ ID NO: 4990 - RNA, 19 nt, synthetic construct
  misc_feature 1..19: note = Description of Artificial Sequence: Synthetic oligonucleotide
  source 1..19: mol_type = other RNA
tgcgggtcttgctgaccgt

SEQ ID NO: 4991 - RNA, 19 nt, synthetic construct
  misc_feature 1..19: note = Description of Artificial Sequence: Synthetic oligonucleotide
  source 1..19: mol_type = other RNA
ttgcgggtcttgctgaccg

SEQ ID NO: 4992 - RNA, 19 nt, synthetic construct
  misc_feature 1..19: note = Description of Artificial Sequence: Synthetic oligonucleotide
  source 1..19: mol_type = other RNA
cttgcgggtcttgctgacc

SEQ ID NO: 4993 - RNA, 19 nt, synthetic construct
  misc_feature 1..19: note = Description of Artificial Sequence: Synthetic oligonucleotide
  source 1..19: mol_type = other RNA
ccttgcgggtcttgctgac

SEQ ID NO: 4994 - RNA, 19 nt, synthetic construct
  misc_feature 1..19: note = Description of Artificial Sequence: Synthetic oligonucleotide
  source 1..19: mol_type = other RNA
cccttgcgggtcttgctga

SEQ ID NO: 4995 - RNA, 19 nt, synthetic construct
  misc_feature 1..19: note = Description of Artificial Sequence: Synthetic oligonucleotide
  source 1..19: mol_type = other RNA
acccttgcgggtcttgctg

SEQ ID NO: 4996 - RNA, 19 nt, synthetic construct
  misc_feature 1..19: note = Description of Artificial Sequence: Synthetic oligonucleotide
  source 1..19: mol_type = other RNA
cacccttgcgggtcttgct

SEQ ID NO: 4997 - RNA, 19 nt, synthetic construct
  misc_feature 1..19: note = Description of Artificial Sequence: Synthetic oligonucleotide
  source 1..19: mol_type = other RNA
acacccttgcgggtcttgc

SEQ ID NO: 4998 - RNA, 19 nt, synthetic construct
  misc_feature 1..19: note = Description of Artificial Sequence: Synthetic oligonucleotide
  source 1..19: mol_type = other RNA
gacacccttgcgggtcttg

SEQ ID NO: 4999 - RNA, 19 nt, synthetic construct
  misc_feature 1..19: note = Description of Artificial Sequence: Synthetic oligonucleotide
  source 1..19: mol_type = other RNA
ggacacccttgcgggtctt

SEQ ID NO: 5000 - RNA, 19 nt, synthetic construct
  misc_feature 1..19: note = Description of Artificial Sequence: Synthetic oligonucleotide
  source 1..19: mol_type = other RNA
tggacacccttgcgggtct

SEQ ID NO: 5001 - RNA, 19 nt, synthetic construct
  misc_feature 1..19: note = Description of Artificial Sequence: Synthetic oligonucleotide
  source 1..19: mol_type = other RNA
ctggacacccttgcgggtc

SEQ ID NO: 5002 - RNA, 19 nt, synthetic construct
  misc_feature 1..19: note = Description of Artificial Sequence: Synthetic oligonucleotide
  source 1..19: mol_type = other RNA
actggacacccttgcgggt

SEQ ID NO: 5003 - RNA, 19 nt, synthetic construct
  misc_feature 1..19: note = Description of Artificial Sequence: Synthetic oligonucleotide
  source 1..19: mol_type = other RNA
cactggacacccttgcggg

SEQ ID NO: 5004 - RNA, 19 nt, synthetic construct
  misc_feature 1..19: note = Description of Artificial Sequence: Synthetic oligonucleotide
  source 1..19: mol_type = other RNA
gcactggacacccttgcgg

SEQ ID NO: 5005 - RNA, 19 nt, synthetic construct
  misc_feature 1..19: note = Description of Artificial Sequence: Synthetic oligonucleotide
  source 1..19: mol_type = other RNA
ggcactggacacccttgcg

SEQ ID NO: 5006 - RNA, 19 nt, synthetic construct
  misc_feature 1..19: note = Description of Artificial Sequence: Synthetic oligonucleotide
  source 1..19: mol_type = other RNA
tggcactggacacccttgc

SEQ ID NO: 5007 - RNA, 19 nt, synthetic construct
  misc_feature 1..19: note = Description of Artificial Sequence: Synthetic oligonucleotide
  source 1..19: mol_type = other RNA
ctggcactggacacccttg

SEQ ID NO: 5008 - RNA, 19 nt, synthetic construct
  misc_feature 1..19: note = Description of Artificial Sequence: Synthetic oligonucleotide
  source 1..19: mol_type = other RNA
gctggcactggacaccctt

SEQ ID NO: 5009 - RNA, 19 nt, synthetic construct
  misc_feature 1..19: note = Description of Artificial Sequence: Synthetic oligonucleotide
  source 1..19: mol_type = other RNA
cgctggcactggacaccct

SEQ ID NO: 5010 - RNA, 19 nt, synthetic construct
  misc_feature 1..19: note = Description of Artificial Sequence: Synthetic oligonucleotide
  source 1..19: mol_type = other RNA
gcgctggcactggacaccc

SEQ ID NO: 5011 - RNA, 19 nt, synthetic construct
  misc_feature 1..19: note = Description of Artificial Sequence: Synthetic oligonucleotide
  source 1..19: mol_type = other RNA
agcgctggcactggacacc

SEQ ID NO: 5012 - RNA, 19 nt, synthetic construct
  misc_feature 1..19: note = Description of Artificial Sequence: Synthetic oligonucleotide
  source 1..19: mol_type = other RNA
cagcgctggcactggacac

SEQ ID NO: 5013 - RNA, 19 nt, synthetic construct
  misc_feature 1..19: note = Description of Artificial Sequence: Synthetic oligonucleotide
  source 1..19: mol_type = other RNA
ccagcgctggcactggaca

SEQ ID NO: 5014 - RNA, 19 nt, synthetic construct
  misc_feature 1..19: note = Description of Artificial Sequence: Synthetic oligonucleotide
  source 1..19: mol_type = other RNA
accagcgctggcactggac

SEQ ID NO: 5015 - RNA, 19 nt, synthetic construct
  misc_feature 1..19: note = Description of Artificial Sequence: Synthetic oligonucleotide
  source 1..19: mol_type = other RNA
gaccagcgctggcactgga

SEQ ID NO: 5016 - RNA, 19 nt, synthetic construct
  misc_feature 1..19: note = Description of Artificial Sequence: Synthetic oligonucleotide
  source 1..19: mol_type = other RNA
ggaccagcgctggcactgg

SEQ ID NO: 5017 - RNA, 19 nt, synthetic construct
  misc_feature 1..19: note = Description of Artificial Sequence: Synthetic oligonucleotide
  source 1..19: mol_type = other RNA
cggaccagcgctggcactg

SEQ ID NO: 5018 - RNA, 19 nt, synthetic construct
  misc_feature 1..19: note = Description of Artificial Sequence: Synthetic oligonucleotide
  source 1..19: mol_type = other RNA
gcggaccagcgctggcact

SEQ ID NO: 5019 - RNA, 19 nt, synthetic construct
  misc_feature 1..19: note = Description of Artificial Sequence: Synthetic oligonucleotide
  source 1..19: mol_type = other RNA
agcggaccagcgctggcac

SEQ ID NO: 5020 - RNA, 19 nt, synthetic construct
  misc_feature 1..19: note = Description of Artificial Sequence: Synthetic oligonucleotide
  source 1..19: mol_type = other RNA
cagcggaccagcgctggca

SEQ ID NO: 5021 - RNA, 19 nt, synthetic construct
  misc_feature 1..19: note = Description of Artificial Sequence: Synthetic oligonucleotide
  source 1..19: mol_type = other RNA
tcagcggaccagcgctggc

SEQ ID NO: 5022 - RNA, 19 nt, synthetic construct
  misc_feature 1..19: note = Description of Artificial Sequence: Synthetic oligonucleotide
  source 1..19: mol_type = other RNA
ctcagcggaccagcgctgg

SEQ ID NO: 5023 - RNA, 19 nt, synthetic construct
  misc_feature 1..19: note = Description of Artificial Sequence: Synthetic oligonucleotide
  source 1..19: mol_type = other RNA
tctcagcggaccagcgctg

SEQ ID NO: 5024 - RNA, 19 nt, synthetic construct
  misc_feature 1..19: note = Description of Artificial Sequence: Synthetic oligonucleotide
  source 1..19: mol_type = other RNA
gtctcagcggaccagcgct

SEQ ID NO: 5025 - RNA, 19 nt, synthetic construct
  misc_feature 1..19: note = Description of Artificial Sequence: Synthetic oligonucleotide
  source 1..19: mol_type = other RNA
cgtctcagcggaccagcgc

SEQ ID NO: 5026 - RNA, 19 nt, synthetic construct
  misc_feature 1..19: note = Description of Artificial Sequence: Synthetic oligonucleotide
  source 1..19: mol_type = other RNA
gcgtctcagcggaccagcg

SEQ ID NO: 5027 - RNA, 19 nt, synthetic construct
  misc_feature 1..19: note = Description of Artificial Sequence: Synthetic oligonucleotide
  source 1..19: mol_type = other RNA
ggcgtctcagcggaccagc

SEQ ID NO: 5028 - RNA, 19 nt, synthetic construct
  misc_feature 1..19: note = Description of Artificial Sequence: Synthetic oligonucleotide
  source 1..19: mol_type = other RNA
cggcgtctcagcggaccag

SEQ ID NO: 5029 - RNA, 19 nt, synthetic construct
  misc_feature 1..19: note = Description of Artificial Sequence: Synthetic oligonucleotide
  source 1..19: mol_type = other RNA
gcggcgtctcagcggacca

SEQ ID NO: 5030 - RNA, 19 nt, synthetic construct
  misc_feature 1..19: note = Description of Artificial Sequence: Synthetic oligonucleotide
  source 1..19: mol_type = other RNA
tgcggcgtctcagcggacc

SEQ ID NO: 5031 - RNA, 19 nt, synthetic construct
  misc_feature 1..19: note = Description of Artificial Sequence: Synthetic oligonucleotide
  source 1..19: mol_type = other RNA
gtgcggcgtctcagcggac

SEQ ID NO: 5032 - RNA, 19 nt, synthetic construct
  misc_feature 1..19: note = Description of Artificial Sequence: Synthetic oligonucleotide
  source 1..19: mol_type = other RNA
tgtgcggcgtctcagcgga

SEQ ID NO: 5033 - RNA, 19 nt, synthetic construct
  misc_feature 1..19: note = Description of Artificial Sequence: Synthetic oligonucleotide
  source 1..19: mol_type = other RNA
ttgtgcggcgtctcagcgg

SEQ ID NO: 5034 - RNA, 19 nt, synthetic construct
  misc_feature 1..19: note = Description of Artificial Sequence: Synthetic oligonucleotide
  source 1..19: mol_type = other RNA
cttgtgcggcgtctcagcg

SEQ ID NO: 5035 - RNA, 19 nt, synthetic construct
  misc_feature 1..19: note = Description of Artificial Sequence: Synthetic oligonucleotide
  source 1..19: mol_type = other RNA
gcttgtgcggcgtctcagc

SEQ ID NO: 5036 - RNA, 19 nt, synthetic construct
  misc_feature 1..19: note = Description of Artificial Sequence: Synthetic oligonucleotide
  source 1..19: mol_type = other RNA
ggcttgtgcggcgtctcag

SEQ ID NO: 5037 - RNA, 19 nt, synthetic construct
  misc_feature 1..19: note = Description of Artificial Sequence: Synthetic oligonucleotide
  source 1..19: mol_type = other RNA
cggcttgtgcggcgtctca

SEQ ID NO: 5038 - RNA, 19 nt, synthetic construct
  misc_feature 1..19: note = Description of Artificial Sequence: Synthetic oligonucleotide
  source 1..19: mol_type = other RNA
gcggcttgtgcggcgtctc

SEQ ID NO: 5039 - RNA, 19 nt, synthetic construct
  misc_feature 1..19: note = Description of Artificial Sequence: Synthetic oligonucleotide
  source 1..19: mol_type = other RNA
tgcggcttgtgcggcgtct

SEQ ID NO: 5040 - RNA, 19 nt, synthetic construct
  misc_feature 1..19: note = Description of Artificial Sequence: Synthetic oligonucleotide
  source 1..19: mol_type = other RNA
ctgcggcttgtgcggcgtc

SEQ ID NO: 5041 - RNA, 19 nt, synthetic construct
  misc_feature 1..19: note = Description of Artificial Sequence: Synthetic oligonucleotide
  source 1..19: mol_type = other RNA
actgcggcttgtgcggcgt

SEQ ID NO: 5042 - RNA, 19 nt, synthetic construct
  misc_feature 1..19: note = Description of Artificial Sequence: Synthetic oligonucleotide
  source 1..19: mol_type = other RNA
aactgcggcttgtgcggcg

SEQ ID NO: 5043 - RNA, 19 nt, synthetic construct
  misc_feature 1..19: note = Description of Artificial Sequence: Synthetic oligonucleotide
  source 1..19: mol_type = other RNA
gaactgcggcttgtgcggc

SEQ ID NO: 5044 - RNA, 19 nt, synthetic construct
  misc_feature 1..19: note = Description of Artificial Sequence: Synthetic oligonucleotide
  source 1..19: mol_type = other RNA
tgaactgcggcttgtgcgg

SEQ ID NO: 5045 - RNA, 19 nt, synthetic construct
  misc_feature 1..19: note = Description of Artificial Sequence: Synthetic oligonucleotide
  source 1..19: mol_type = other RNA
gtgaactgcggcttgtgcg

SEQ ID NO: 5046 - RNA, 19 nt, synthetic construct
  misc_feature 1..19: note = Description of Artificial Sequence: Synthetic oligonucleotide
  source 1..19: mol_type = other RNA
cgtgaactgcggcttgtgc

SEQ ID NO: 5047 - RNA, 19 nt, synthetic construct
  misc_feature 1..19: note = Description of Artificial Sequence: Synthetic oligonucleotide
  source 1..19: mol_type = other RNA
acgtgaactgcggcttgtg

SEQ ID NO: 5048 - RNA, 19 nt, synthetic construct
  misc_feature 1..19: note = Description of Artificial Sequence: Synthetic oligonucleotide
  source 1..19: mol_type = other RNA
aacgtgaactgcggcttgt

SEQ ID NO: 5049 - RNA, 19 nt, synthetic construct
  misc_feature 1..19: note = Description of Artificial Sequence: Synthetic oligonucleotide
  source 1..19: mol_type = other RNA
aaacgtgaactgcggcttg

SEQ ID NO: 5050 - RNA, 19 nt, synthetic construct
  misc_feature 1..19: note = Description of Artificial Sequence: Synthetic oligonucleotide
  source 1..19: mol_type = other RNA
taaacgtgaactgcggctt

SEQ ID NO: 5051 - RNA, 19 nt, synthetic construct
  misc_feature 1..19: note = Description of Artificial Sequence: Synthetic oligonucleotide
  source 1..19: mol_type = other RNA
gtaaacgtgaactgcggct

SEQ ID NO: 5052 - RNA, 19 nt, synthetic construct
  misc_feature 1..19: note = Description of Artificial Sequence: Synthetic oligonucleotide
  source 1..19: mol_type = other RNA
ggtaaacgtgaactgcggc

SEQ ID NO: 5053 - RNA, 19 nt, synthetic construct
  misc_feature 1..19: note = Description of Artificial Sequence: Synthetic oligonucleotide
  source 1..19: mol_type = other RNA
aggtaaacgtgaactgcgg

SEQ ID NO: 5054 - RNA, 19 nt, synthetic construct
  misc_feature 1..19: note = Description of Artificial Sequence: Synthetic oligonucleotide
  source 1..19: mol_type = other RNA
gaggtaaacgtgaactgcg

SEQ ID NO: 5055 - RNA, 19 nt, synthetic construct
  misc_feature 1..19: note = Description of Artificial Sequence: Synthetic oligonucleotide
  source 1..19: mol_type = other RNA
ggaggtaaacgtgaactgc

SEQ ID NO: 5056 - RNA, 19 nt, synthetic construct
  misc_feature 1..19: note = Description of Artificial Sequence: Synthetic oligonucleotide
  source 1..19: mol_type = other RNA
cggaggtaaacgtgaactg

SEQ ID NO: 5057 - RNA, 19 nt, synthetic construct
  misc_feature 1..19: note = Description of Artificial Sequence: Synthetic oligonucleotide
  source 1..19: mol_type = other RNA
tcggaggtaaacgtgaact

SEQ ID NO: 5058 - RNA, 19 nt, synthetic construct
  misc_feature 1..19: note = Description of Artificial Sequence: Synthetic oligonucleotide
  source 1..19: mol_type = other RNA
ttcggaggtaaacgtgaac

SEQ ID NO: 5059 - RNA, 19 nt, synthetic construct
  misc_feature 1..19: note = Description of Artificial Sequence: Synthetic oligonucleotide
  source 1..19: mol_type = other RNA
gttcggaggtaaacgtgaa

SEQ ID NO: 5060 - RNA, 19 nt, synthetic construct
  misc_feature 1..19: note = Description of Artificial Sequence: Synthetic oligonucleotide
  source 1..19: mol_type = other RNA
ggttcggaggtaaacgtga

SEQ ID NO: 5061 - RNA, 19 nt, synthetic construct
  misc_feature 1..19: note = Description of Artificial Sequence: Synthetic oligonucleotide
  source 1..19: mol_type = other RNA
cggttcggaggtaaacgtg

SEQ ID NO: 5062 - RNA, 19 nt, synthetic construct
  misc_feature 1..19: note = Description of Artificial Sequence: Synthetic oligonucleotide
  source 1..19: mol_type = other RNA
gcggttcggaggtaaacgt

SEQ ID NO: 5063 - RNA, 19 nt, synthetic construct
  misc_feature 1..19: note = Description of Artificial Sequence: Synthetic oligonucleotide
  source 1..19: mol_type = other RNA
tgcggttcggaggtaaacg

SEQ ID NO: 5064 - RNA, 19 nt, synthetic construct
  misc_feature 1..19: note = Description of Artificial Sequence: Synthetic oligonucleotide
  source 1..19: mol_type = other RNA
atgcggttcggaggtaaac

SEQ ID NO: 5065 - RNA, 19 nt, synthetic construct
  misc_feature 1..19: note = Description of Artificial Sequence: Synthetic oligonucleotide
  source 1..19: mol_type = other RNA
catgcggttcggaggtaaa

SEQ ID NO: 5066 - RNA, 19 nt, synthetic construct
  misc_feature 1..19: note = Description of Artificial Sequence: Synthetic oligonucleotide
  source 1..19: mol_type = other RNA
gcatgcggttcggaggtaa

SEQ ID NO: 5067 - RNA, 19 nt, synthetic construct
  misc_feature 1..19: note = Description of Artificial Sequence: Synthetic oligonucleotide
  source 1..19: mol_type = other RNA
tgcatgcggttcggaggta

SEQ ID NO: 5068 - RNA, 19 nt, synthetic construct
  misc_feature 1..19: note = Description of Artificial Sequence: Synthetic oligonucleotide
  source 1..19: mol_type = other RNA
gtgcatgcggttcggaggt

SEQ ID NO: 5069 - RNA, 19 nt, synthetic construct
  misc_feature 1..19: note = Description of Artificial Sequence: Synthetic oligonucleotide
  source 1..19: mol_type = other RNA
tgtgcatgcggttcggagg

SEQ ID NO: 5070 - RNA, 19 nt, synthetic construct
  misc_feature 1..19: note = Description of Artificial Sequence: Synthetic oligonucleotide
  source 1..19: mol_type = other RNA
ttgtgcatgcggttcggag

SEQ ID NO: 5071 - RNA, 19 nt, synthetic construct
  misc_feature 1..19: note = Description of Artificial Sequence: Synthetic oligonucleotide
  source 1..19: mol_type = other RNA
gttgtgcatgcggttcgga

SEQ ID NO: 5072 - RNA, 19 nt, synthetic construct
  misc_feature 1..19: note = Description of Artificial Sequence: Synthetic oligonucleotide
  source 1..19: mol_type = other RNA
agttgtgcatgcggttcgg

SEQ ID NO: 5073 - RNA, 19 nt, synthetic construct
  misc_feature 1..19: note = Description of Artificial Sequence: Synthetic oligonucleotide
  source 1..19: mol_type = other RNA
cagttgtgcatgcggttcg

SEQ ID NO: 5074 - RNA, 19 nt, synthetic construct
  misc_feature 1..19: note = Description of Artificial Sequence: Synthetic oligonucleotide
  source 1..19: mol_type = other RNA
ccagttgtgcatgcggttc

SEQ ID NO: 5075 - RNA, 19 nt, synthetic construct
  misc_feature 1..19: note = Description of Artificial Sequence: Synthetic oligonucleotide
  source 1..19: mol_type = other RNA
tccagttgtgcatgcggtt

SEQ ID NO: 5076 - RNA, 19 nt, synthetic construct
  misc_feature 1..19: note = Description of Artificial Sequence: Synthetic oligonucleotide
  source 1..19: mol_type = other RNA
ctccagttgtgcatgcggt

SEQ ID NO: 5077 - RNA, 19 nt, synthetic construct
  misc_feature 1..19: note = Description of Artificial Sequence: Synthetic oligonucleotide
  source 1..19: mol_type = other RNA
cctccagttgtgcatgcgg

SEQ ID NO: 5078 - RNA, 19 nt, synthetic construct
  misc_feature 1..19: note = Description of Artificial Sequence: Synthetic oligonucleotide
  source 1..19: mol_type = other RNA
tcctccagttgtgcatgcg

SEQ ID NO: 5079 - RNA, 19 nt, synthetic construct
  misc_feature 1..19: note = Description of Artificial Sequence: Synthetic oligonucleotide
  source 1..19: mol_type = other RNA
ctcctccagttgtgcatgc

SEQ ID NO: 5080 - RNA, 19 nt, synthetic construct
  misc_feature 1..19: note = Description of Artificial Sequence: Synthetic oligonucleotide
  source 1..19: mol_type = other RNA
tctcctccagttgtgcatg

SEQ ID NO: 5081 - RNA, 19 nt, synthetic construct
  misc_feature 1..19: note = Description of Artificial Sequence: Synthetic oligonucleotide
  source 1..19: mol_type = other RNA
ttctcctccagttgtgcat

SEQ ID NO: 5082 - RNA, 19 nt, synthetic construct
  misc_feature 1..19: note = Description of Artificial Sequence: Synthetic oligonucleotide
  source 1..19: mol_type = other RNA
gttctcctccagttgtgca

SEQ ID NO: 5083 - RNA, 19 nt, synthetic construct
  misc_feature 1..19: note = Description of Artificial Sequence: Synthetic oligonucleotide
  source 1..19: mol_type = other RNA
agttctcctccagttgtgc

SEQ ID NO: 5084 - RNA, 19 nt, synthetic construct
  misc_feature 1..19: note = Description of Artificial Sequence: Synthetic oligonucleotide
  source 1..19: mol_type = other RNA
aagttctcctccagttgtg

SEQ ID NO: 5085 - RNA, 19 nt, synthetic construct
  misc_feature 1..19: note = Description of Artificial Sequence: Synthetic oligonucleotide
  source 1..19: mol_type = other RNA
gaagttctcctccagttgt

SEQ ID NO: 5086 - RNA, 19 nt, synthetic construct
  misc_feature 1..19: note = Description of Artificial Sequence: Synthetic oligonucleotide
  source 1..19: mol_type = other RNA
agaagttctcctccagttg

SEQ ID NO: 5087 - RNA, 19 nt, synthetic construct
  misc_feature 1..19: note = Description of Artificial Sequence: Synthetic oligonucleotide
  source 1..19: mol_type = other RNA
cagaagttctcctccagtt

SEQ ID NO: 5088 - RNA, 19 nt, synthetic construct
  misc_feature 1..19: note = Description of Artificial Sequence: Synthetic oligonucleotide
  source 1..19: mol_type = other RNA
gcagaagttctcctccagt

SEQ ID NO: 5089 - RNA, 19 nt, synthetic construct
  misc_feature 1..19: note = Description of Artificial Sequence: Synthetic oligonucleotide
  source 1..19: mol_type = other RNA
ggcagaagttctcctccag

SEQ ID NO: 5090 - RNA, 19 nt, synthetic construct
  misc_feature 1..19: note = Description of Artificial Sequence: Synthetic oligonucleotide
  source 1..19: mol_type = other RNA
cggcagaagttctcctcca

SEQ ID NO: 5091 - RNA, 19 nt, synthetic construct
  misc_feature 1..19: note = Description of Artificial Sequence: Synthetic oligonucleotide
  source 1..19: mol_type = other RNA
ccggcagaagttctcctcc

SEQ ID NO: 5092 - RNA, 19 nt, synthetic construct
  misc_feature 1..19: note = Description of Artificial Sequence: Synthetic oligonucleotide
  source 1..19: mol_type = other RNA
tccggcagaagttctcctc

SEQ ID NO: 5093 - RNA, 19 nt, synthetic construct
  misc_feature 1..19: note = Description of Artificial Sequence: Synthetic oligonucleotide
  source 1..19: mol_type = other RNA
ttccggcagaagttctcct

SEQ ID NO: 5094 - RNA, 19 nt, synthetic construct
  misc_feature 1..19: note = Description of Artificial Sequence: Synthetic oligonucleotide
  source 1..19: mol_type = other RNA
gttccggcagaagttctcc

SEQ ID NO: 5095 - RNA, 19 nt, synthetic construct
  misc_feature 1..19: note = Description of Artificial Sequence: Synthetic oligonucleotide
  source 1..19: mol_type = other RNA
ggttccggcagaagttctc

SEQ ID NO: 5096 - RNA, 19 nt, synthetic construct
  misc_feature 1..19: note = Description of Artificial Sequence: Synthetic oligonucleotide
  source 1..19: mol_type = other RNA
gggttccggcagaagttct

SEQ ID NO: 5097 - RNA, 19 nt, synthetic construct
  misc_feature 1..19: note = Description of Artificial Sequence: Synthetic oligonucleotide
  source 1..19: mol_type = other RNA
tgggttccggcagaagttc

SEQ ID NO: 5098 - RNA, 19 nt, synthetic construct
  misc_feature 1..19: note = Description of Artificial Sequence: Synthetic oligonucleotide
  source 1..19: mol_type = other RNA
ctgggttccggcagaagtt

SEQ ID NO: 5099 - RNA, 19 nt, synthetic construct
  misc_feature 1..19: note = Description of Artificial Sequence: Synthetic oligonucleotide
  source 1..19: mol_type = other RNA
tctgggttccggcagaagt

SEQ ID NO: 5100 - RNA, 19 nt, synthetic construct
  misc_feature 1..19: note = Description of Artificial Sequence: Synthetic oligonucleotide
  source 1..19: mol_type = other RNA
atctgggttccggcagaag

SEQ ID NO: 5101 - RNA, 19 nt, synthetic construct
  misc_feature 1..19: note = Description of Artificial Sequence: Synthetic oligonucleotide
  source 1..19: mol_type = other RNA
catctgggttccggcagaa

SEQ ID NO: 5102 - RNA, 19 nt, synthetic construct
  misc_feature 1..19: note = Description of Artificial Sequence: Synthetic oligonucleotide
  source 1..19: mol_type = other RNA
ccatctgggttccggcaga

SEQ ID NO: 5103 - RNA, 19 nt, synthetic construct
  misc_feature 1..19: note = Description of Artificial Sequence: Synthetic oligonucleotide
  source 1..19: mol_type = other RNA
cccatctgggttccggcag

SEQ ID NO: 5104 - RNA, 19 nt, synthetic construct
  misc_feature 1..19: note = Description of Artificial Sequence: Synthetic oligonucleotide
  source 1..19: mol_type = other RNA
ccccatctgggttccggca

SEQ ID NO: 5105 - RNA, 19 nt, synthetic construct
  misc_feature 1..19: note = Description of Artificial Sequence: Synthetic oligonucleotide
  source 1..19: mol_type = other RNA
tccccatctgggttccggc

SEQ ID NO: 5106 - RNA, 19 nt, synthetic construct
  misc_feature 1..19: note = Description of Artificial Sequence: Synthetic oligonucleotide
  source 1..19: mol_type = other RNA
atccccatctgggttccgg

SEQ ID NO: 5107 - RNA, 19 nt, synthetic construct
  misc_feature 1..19: note = Description of Artificial Sequence: Synthetic oligonucleotide
  source 1..19: mol_type = other RNA
tatccccatctgggttccg

SEQ ID NO: 5108 - RNA, 19 nt, synthetic construct
  misc_feature 1..19: note = Description of Artificial Sequence: Synthetic oligonucleotide
  source 1..19: mol_type = other RNA
ctatccccatctgggttcc

SEQ ID NO: 5109 - RNA, 19 nt, synthetic construct
  misc_feature 1..19: note = Description of Artificial Sequence: Synthetic oligonucleotide
  source 1..19: mol_type = other RNA
gctatccccatctgggttc

SEQ ID NO: 5110 - RNA, 19 nt, synthetic construct
  misc_feature 1..19: note = Description of Artificial Sequence: Synthetic oligonucleotide
  source 1..19: mol_type = other RNA
ggctatccccatctgggtt

SEQ ID NO: 5111 - RNA, 19 nt, synthetic construct
  misc_feature 1..19: note = Description of Artificial Sequence: Synthetic oligonucleotide
  source 1..19: mol_type = other RNA
tggctatccccatctgggt

SEQ ID NO: 5112 - RNA, 19 nt, synthetic construct
  misc_feature 1..19: note = Description of Artificial Sequence: Synthetic oligonucleotide
  source 1..19: mol_type = other RNA
atggctatccccatctggg

SEQ ID NO: 5113 - RNA, 19 nt, synthetic construct
  misc_feature 1..19: note = Description of Artificial Sequence: Synthetic oligonucleotide
  source 1..19: mol_type = other RNA
catggctatccccatctgg

SEQ ID NO: 5114 - RNA, 19 nt, synthetic construct
  misc_feature 1..19: note = Description of Artificial Sequence: Synthetic oligonucleotide
  source 1..19: mol_type = other RNA
ccatggctatccccatctg

SEQ ID NO: 5115 - RNA, 19 nt, synthetic construct
  misc_feature 1..19: note = Description of Artificial Sequence: Synthetic oligonucleotide
  source 1..19: mol_type = other RNA
cccatggctatccccatct

SEQ ID NO: 5116 - RNA, 19 nt, synthetic construct
  misc_feature 1..19: note = Description of Artificial Sequence: Synthetic oligonucleotide
  source 1..19: mol_type = other RNA
gcccatggctatccccatc

SEQ ID NO: 5117 - RNA, 19 nt, synthetic construct
  misc_feature 1..19: note = Description of Artificial Sequence: Synthetic oligonucleotide
  source 1..19: mol_type = other RNA
ggcccatggctatccccat

SEQ ID NO: 5118 - RNA, 19 nt, synthetic construct
  misc_feature 1..19: note = Description of Artificial Sequence: Synthetic oligonucleotide
  source 1..19: mol_type = other RNA
gggcccatggctatcccca

SEQ ID NO: 5119 - RNA, 19 nt, synthetic construct
  misc_feature 1..19: note = Description of Artificial Sequence: Synthetic oligonucleotide
  source 1..19: mol_type = other RNA
agggcccatggctatcccc

SEQ ID NO: 5120 - RNA, 19 nt, synthetic construct
  misc_feature 1..19: note = Description of Artificial Sequence: Synthetic oligonucleotide
  source 1..19: mol_type = other RNA
cagggcccatggctatccc

SEQ ID NO: 5121 - RNA, 19 nt, synthetic construct
  misc_feature 1..19: note = Description of Artificial Sequence: Synthetic oligonucleotide
  source 1..19: mol_type = other RNA
ccagggcccatggctatcc

SEQ ID NO: 5122 - RNA, 19 nt, synthetic construct
  misc_feature 1..19: note = Description of Artificial Sequence: Synthetic oligonucleotide
  source 1..19: mol_type = other RNA
accagggcccatggctatc

SEQ ID NO: 5123 - RNA, 19 nt, synthetic construct
  misc_feature 1..19: note = Description of Artificial Sequence: Synthetic oligonucleotide
  source 1..19: mol_type = other RNA
caccagggcccatggctat

SEQ ID NO: 5124 - RNA, 19 nt, synthetic construct
  misc_feature 1..19: note = Description of Artificial Sequence: Synthetic oligonucleotide
  source 1..19: mol_type = other RNA
gcaccagggcccatggcta

SEQ ID NO: 5125 - RNA, 19 nt, synthetic construct
  misc_feature 1..19: note = Description of Artificial Sequence: Synthetic oligonucleotide
  source 1..19: mol_type = other RNA
agcaccagggcccatggct

SEQ ID NO: 5126 - RNA, 19 nt, synthetic construct
  misc_feature 1..19: note = Description of Artificial Sequence: Synthetic oligonucleotide
  source 1..19: mol_type = other RNA
tagcaccagggcccatggc

SEQ ID NO: 5127 - RNA, 19 nt, synthetic construct
  misc_feature 1..19: note = Description of Artificial Sequence: Synthetic oligonucleotide
  source 1..19: mol_type = other RNA
gtagcaccagggcccatgg

SEQ ID NO: 5128 - RNA, 19 nt, synthetic construct
  misc_feature 1..19: note = Description of Artificial Sequence: Synthetic oligonucleotide
  source 1..19: mol_type = other RNA
tgtagcaccagggcccatg

SEQ ID NO: 5129 - RNA, 19 nt, synthetic construct
  misc_feature 1..19: note = Description of Artificial Sequence: Synthetic oligonucleotide
  source 1..19: mol_type = other RNA
gtgtagcaccagggcccat

SEQ ID NO: 5130 - RNA, 19 nt, synthetic construct
  misc_feature 1..19: note = Description of Artificial Sequence: Synthetic oligonucleotide
  source 1..19: mol_type = other RNA
cgtgtagcaccagggccca

SEQ ID NO: 5131 - RNA, 19 nt, synthetic construct
  misc_feature 1..19: note = Description of Artificial Sequence: Synthetic oligonucleotide
  source 1..19: mol_type = other RNA
tcgtgtagcaccagggccc

SEQ ID NO: 5132 - RNA, 19 nt, synthetic construct
  misc_feature 1..19: note = Description of Artificial Sequence: Synthetic oligonucleotide
  source 1..19: mol_type = other RNA
atcgtgtagcaccagggcc

SEQ ID NO: 5133 - RNA, 19 nt, synthetic construct
  misc_feature 1..19: note = Description of Artificial Sequence: Synthetic oligonucleotide
  source 1..19: mol_type = other RNA
catcgtgtagcaccagggc

SEQ ID NO: 5134 - RNA, 19 nt, synthetic construct
  misc_feature 1..19: note = Description of Artificial Sequence: Synthetic oligonucleotide
  source 1..19: mol_type = other RNA
ccatcgtgtagcaccaggg

SEQ ID NO: 5135 - RNA, 19 nt, synthetic construct
  misc_feature 1..19: note = Description of Artificial Sequence: Synthetic oligonucleotide
  source 1..19: mol_type = other RNA
tccatcgtgtagcaccagg

SEQ ID NO: 5136 - RNA, 19 nt, synthetic construct
  misc_feature 1..19: note = Description of Artificial Sequence: Synthetic oligonucleotide
  source 1..19: mol_type = other RNA
gtccatcgtgtagcaccag

SEQ ID NO: 5137 - RNA, 19 nt, synthetic construct
  misc_feature 1..19: note = Description of Artificial Sequence: Synthetic oligonucleotide
  source 1..19: mol_type = other RNA
ggtccatcgtgtagcacca

SEQ ID NO: 5138 - RNA, 19 nt, synthetic construct
  misc_feature 1..19: note = Description of Artificial Sequence: Synthetic oligonucleotide
  source 1..19: mol_type = other RNA
gggtccatcgtgtagcacc

SEQ ID NO: 5139 - RNA, 19 nt, synthetic construct
  misc_feature 1..19: note = Description of Artificial Sequence: Synthetic oligonucleotide
  source 1..19: mol_type = other RNA
tgggtccatcgtgtagcac

SEQ ID NO: 5140 - RNA, 19 nt, synthetic construct
  misc_feature 1..19: note = Description of Artificial Sequence: Synthetic oligonucleotide
  source 1..19: mol_type = other RNA
ttgggtccatcgtgtagca

SEQ ID NO: 5141 - RNA, 19 nt, synthetic construct
  misc_feature 1..19: note = Description of Artificial Sequence: Synthetic oligonucleotide
  source 1..19: mol_type = other RNA
cttgggtccatcgtgtagc

SEQ ID NO: 5142 - RNA, 19 nt, synthetic construct
  misc_feature 1..19: note = Description of Artificial Sequence: Synthetic oligonucleotide
  source 1..19: mol_type = other RNA
ccttgggtccatcgtgtag

SEQ ID NO: 5143 - RNA, 19 nt, synthetic construct
  misc_feature 1..19: note = Description of Artificial Sequence: Synthetic oligonucleotide
  source 1..19: mol_type = other RNA
tccttgggtccatcgtgta

SEQ ID NO: 5144 - RNA, 19 nt, synthetic construct
  misc_feature 1..19: note = Description of Artificial Sequence: Synthetic oligonucleotide
  source 1..19: mol_type = other RNA
gtccttgggtccatcgtgt

SEQ ID NO: 5145 - RNA, 19 nt, synthetic construct
  misc_feature 1..19: note = Description of Artificial Sequence: Synthetic oligonucleotide
  source 1..19: mol_type = other RNA
ggtccttgggtccatcgtg

SEQ ID NO: 5146 - RNA, 19 nt, synthetic construct
  misc_feature 1..19: note = Description of Artificial Sequence: Synthetic oligonucleotide
  source 1..19: mol_type = other RNA
gggtccttgggtccatcgt

SEQ ID NO: 5147 - RNA, 19 nt, synthetic construct
  misc_feature 1..19: note = Description of Artificial Sequence: Synthetic oligonucleotide
  source 1..19: mol_type = other RNA
ggggtccttgggtccatcg

SEQ ID NO: 5148 - RNA, 19 nt, synthetic construct
  misc_feature 1..19: note = Description of Artificial Sequence: Synthetic oligonucleotide
  source 1..19: mol_type = other RNA
tggggtccttgggtccatc

SEQ ID NO: 5149 - RNA, 19 nt, synthetic construct
  misc_feature 1..19: note = Description of Artificial Sequence: Synthetic oligonucleotide
  source 1..19: mol_type = other RNA
atggggtccttgggtccat

SEQ ID NO: 5150 - RNA, 19 nt, synthetic construct
  misc_feature 1..19: note = Description of Artificial Sequence: Synthetic oligonucleotide
  source 1..19: mol_type = other RNA
aatggggtccttgggtcca

SEQ ID NO: 5151 - RNA, 19 nt, synthetic construct
  misc_feature 1..19: note = Description of Artificial Sequence: Synthetic oligonucleotide
  source 1..19: mol_type = other RNA
gaatggggtccttgggtcc

SEQ ID NO: 5152 - RNA, 19 nt, synthetic construct
  misc_feature 1..19: note = Description of Artificial Sequence: Synthetic oligonucleotide
  source 1..19: mol_type = other RNA
cgaatggggtccttgggtc

SEQ ID NO: 5153 - RNA, 19 nt, synthetic construct
  misc_feature 1..19: note = Description of Artificial Sequence: Synthetic oligonucleotide
  source 1..19: mol_type = other RNA
tcgaatggggtccttgggt

SEQ ID NO: 5154 - RNA, 19 nt, synthetic construct
  misc_feature 1..19: note = Description of Artificial Sequence: Synthetic oligonucleotide
  source 1..19: mol_type = other RNA
gtcgaatggggtccttggg

SEQ ID NO: 5155 - RNA, 19 nt, synthetic construct
  misc_feature 1..19: note = Description of Artificial Sequence: Synthetic oligonucleotide
  source 1..19: mol_type = other RNA
agtcgaatggggtccttgg

SEQ ID NO: 5156 - RNA, 19 nt, synthetic construct
  misc_feature 1..19: note = Description of Artificial Sequence: Synthetic oligonucleotide
  source 1..19: mol_type = other RNA
tagtcgaatggggtccttg

SEQ ID NO: 5157 - RNA, 19 nt, synthetic construct
  misc_feature 1..19: note = Description of Artificial Sequence: Synthetic oligonucleotide
  source 1..19: mol_type = other RNA
gtagtcgaatggggtcctt

SEQ ID NO: 5158 - RNA, 19 nt, synthetic construct
  misc_feature 1..19: note = Description of Artificial Sequence: Synthetic oligonucleotide
  source 1..19: mol_type = other RNA
agtagtcgaatggggtcct

SEQ ID NO: 5159 - RNA, 19 nt, synthetic construct
  misc_feature 1..19: note = Description of Artificial Sequence: Synthetic oligonucleotide
  source 1..19: mol_type = other RNA
cagtagtcgaatggggtcc

SEQ ID NO: 5160 - RNA, 19 nt, synthetic construct
  misc_feature 1..19: note = Description of Artificial Sequence: Synthetic oligonucleotide
  source 1..19: mol_type = other RNA
acagtagtcgaatggggtc

SEQ ID NO: 5161 - RNA, 19 nt, synthetic construct
  misc_feature 1..19: note = Description of Artificial Sequence: Synthetic oligonucleotide
  source 1..19: mol_type = other RNA
cacagtagtcgaatggggt

SEQ ID NO: 5162 - RNA, 19 nt, synthetic construct
  misc_feature 1..19: note = Description of Artificial Sequence: Synthetic oligonucleotide
  source 1..19: mol_type = other RNA
gcacagtagtcgaatgggg

SEQ ID NO: 5163 - RNA, 19 nt, synthetic construct
  misc_feature 1..19: note = Description of Artificial Sequence: Synthetic oligonucleotide
  source 1..19: mol_type = other RNA
ggcacagtagtcgaatggg

SEQ ID NO: 5164 - RNA, 19 nt, synthetic construct
  misc_feature 1..19: note = Description of Artificial Sequence: Synthetic oligonucleotide
  source 1..19: mol_type = other RNA
gggcacagtagtcgaatgg

SEQ ID NO: 5165 - RNA, 19 nt, synthetic construct
  misc_feature 1..19: note = Description of Artificial Sequence: Synthetic oligonucleotide
  source 1..19: mol_type = other RNA
agggcacagtagtcgaatg

SEQ ID NO: 5166 - RNA, 19 nt, synthetic construct
  misc_feature 1..19: note = Description of Artificial Sequence: Synthetic oligonucleotide
  source 1..19: mol_type = other RNA
cagggcacagtagtcgaat

SEQ ID NO: 5167 - RNA, 19 nt, synthetic construct
  misc_feature 1..19: note = Description of Artificial Sequence: Synthetic oligonucleotide
  source 1..19: mol_type = other RNA
gcagggcacagtagtcgaa

SEQ ID NO: 5168 - RNA, 19 nt, synthetic construct
  misc_feature 1..19: note = Description of Artificial Sequence: Synthetic oligonucleotide
  source 1..19: mol_type = other RNA
cgcagggcacagtagtcga

SEQ ID NO: 5169 - RNA, 19 nt, synthetic construct
  misc_feature 1..19: note = Description of Artificial Sequence: Synthetic oligonucleotide
  source 1..19: mol_type = other RNA
tcgcagggcacagtagtcg

SEQ ID NO: 5170 - RNA, 19 nt, synthetic construct
  misc_feature 1..19: note = Description of Artificial Sequence: Synthetic oligonucleotide
  source 1..19: mol_type = other RNA
gtcgcagggcacagtagtc

SEQ ID NO: 5171 - RNA, 19 nt, synthetic construct
  misc_feature 1..19: note = Description of Artificial Sequence: Synthetic oligonucleotide
  source 1..19: mol_type = other RNA
cgtcgcagggcacagtagt

SEQ ID NO: 5172 - RNA, 19 nt, synthetic construct
  misc_feature 1..19: note = Description of Artificial Sequence: Synthetic oligonucleotide
  source 1..19: mol_type = other RNA
gcgtcgcagggcacagtag

SEQ ID NO: 5173 - RNA, 19 nt, synthetic construct
  misc_feature 1..19: note = Description of Artificial Sequence: Synthetic oligonucleotide
  source 1..19: mol_type = other RNA
agcgtcgcagggcacagta

SEQ ID NO: 5174 - RNA, 19 nt, synthetic construct
  misc_feature 1..19: note = Description of Artificial Sequence: Synthetic oligonucleotide
  source 1..19: mol_type = other RNA
cagcgtcgcagggcacagt

SEQ ID NO: 5175 - RNA, 19 nt, synthetic construct
  misc_feature 1..19: note = Description of Artificial Sequence: Synthetic oligonucleotide
  source 1..19: mol_type = other RNA
gcagcgtcgcagggcacag

SEQ ID NO: 5176 - RNA, 19 nt, synthetic construct
  misc_feature 1..19: note = Description of Artificial Sequence: Synthetic oligonucleotide
  source 1..19: mol_type = other RNA
cgcagcgtcgcagggcaca

SEQ ID NO: 5177 - RNA, 19 nt, synthetic construct
  misc_feature 1..19: note = Description of Artificial Sequence: Synthetic oligonucleotide
  source 1..19: mol_type = other RNA
gcgcagcgtcgcagggcac

SEQ ID NO: 5178 - RNA, 19 nt, synthetic construct
  misc_feature 1..19: note = Description of Artificial Sequence: Synthetic oligonucleotide
  source 1..19: mol_type = other RNA
agcgcagcgtcgcagggca

SEQ ID NO: 5179 - RNA, 19 nt, synthetic construct
  misc_feature 1..19: note = Description of Artificial Sequence: Synthetic oligonucleotide
  source 1..19: mol_type = other RNA
cagcgcagcgtcgcagggc

SEQ ID NO: 5180 - RNA, 19 nt, synthetic construct
  misc_feature 1..19: note = Description of Artificial Sequence: Synthetic oligonucleotide
  source 1..19: mol_type = other RNA
tcagcgcagcgtcgcaggg

SEQ ID NO: 5181 - RNA, 19 nt, synthetic construct
  misc_feature 1..19: note = Description of Artificial Sequence: Synthetic oligonucleotide
  source 1..19: mol_type = other RNA
atcagcgcagcgtcgcagg

SEQ ID NO: 5182 - RNA, 19 nt, synthetic construct
  misc_feature 1..19: note = Description of Artificial Sequence: Synthetic oligonucleotide
  source 1..19: mol_type = other RNA
catcagcgcagcgtcgcag

SEQ ID NO: 5183 - RNA, 19 nt, synthetic construct
  misc_feature 1..19: note = Description of Artificial Sequence: Synthetic oligonucleotide
  source 1..19: mol_type = other RNA
tcatcagcgcagcgtcgca

SEQ ID NO: 5184 - RNA, 19 nt, synthetic construct
  misc_feature 1..19: note = Description of Artificial Sequence: Synthetic oligonucleotide
  source 1..19: mol_type = other RNA
gtcatcagcgcagcgtcgc

SEQ ID NO: 5185 - RNA, 19 nt, synthetic construct
  misc_feature 1..19: note = Description of Artificial Sequence: Synthetic oligonucleotide
  source 1..19: mol_type = other RNA
ggtcatcagcgcagcgtcg

SEQ ID NO: 5186 - RNA, 19 nt, synthetic construct
  misc_feature 1..19: note = Description of Artificial Sequence: Synthetic oligonucleotide
  source 1..19: mol_type = other RNA
tggtcatcagcgcagcgtc

SEQ ID NO: 5187 - RNA, 19 nt, synthetic construct
  misc_feature 1..19: note = Description of Artificial Sequence: Synthetic oligonucleotide
  source 1..19: mol_type = other RNA
ctggtcatcagcgcagcgt

SEQ ID NO: 5188 - RNA, 19 nt, synthetic construct
  misc_feature 1..19: note = Description of Artificial Sequence: Synthetic oligonucleotide
  source 1..19: mol_type = other RNA
gctggtcatcagcgcagcg

SEQ ID NO: 5189 - RNA, 19 nt, synthetic construct
  misc_feature 1..19: note = Description of Artificial Sequence: Synthetic oligonucleotide
  source 1..19: mol_type = other RNA
ggctggtcatcagcgcagc

SEQ ID NO: 5190 - RNA, 19 nt, synthetic construct
  misc_feature 1..19: note = Description of Artificial Sequence: Synthetic oligonucleotide
  source 1..19: mol_type = other RNA
cggctggtcatcagcgcag

SEQ ID NO: 5191 - RNA, 19 nt, synthetic construct
  misc_feature 1..19: note = Description of Artificial Sequence: Synthetic oligonucleotide
  source 1..19: mol_type = other RNA
gcggctggtcatcagcgca

SEQ ID NO: 5192 - RNA, 19 nt, synthetic construct
  misc_feature 1..19: note = Description of Artificial Sequence: Synthetic oligonucleotide
  source 1..19: mol_type = other RNA
ggcggctggtcatcagcgc

SEQ ID NO: 5193 - RNA, 19 nt, synthetic construct
  misc_feature 1..19: note = Description of Artificial Sequence: Synthetic oligonucleotide
  source 1..19: mol_type = other RNA
tggcggctggtcatcagcg

SEQ ID NO: 5194 - RNA, 19 nt, synthetic construct
  misc_feature 1..19: note = Description of Artificial Sequence: Synthetic oligonucleotide
  source 1..19: mol_type = other RNA
atggcggctggtcatcagc

SEQ ID NO: 5195 - RNA, 19 nt, synthetic construct
  misc_feature 1..19: note = Description of Artificial Sequence: Synthetic oligonucleotide
  source 1..19: mol_type = other RNA
gatggcggctggtcatcag

SEQ ID NO: 5196 - RNA, 19 nt, synthetic construct
  misc_feature 1..19: note = Description of Artificial Sequence: Synthetic oligonucleotide
  source 1..19: mol_type = other RNA
tgatggcggctggtcatca

SEQ ID NO: 5197 - RNA, 19 nt, synthetic construct
  misc_feature 1..19: note = Description of Artificial Sequence: Synthetic oligonucleotide
  source 1..19: mol_type = other RNA
ttgatggcggctggtcatc

SEQ ID NO: 5198 - RNA, 19 nt, synthetic construct
  misc_feature 1..19: note = Description of Artificial Sequence: Synthetic oligonucleotide
  source 1..19: mol_type = other RNA
attgatggcggctggtcat

SEQ ID NO: 5199 - RNA, 19 nt, synthetic construct
  misc_feature 1..19: note = Description of Artificial Sequence: Synthetic oligonucleotide
  source 1..19: mol_type = other RNA
gattgatggcggctggtca

SEQ ID NO: 5200 - RNA, 19 nt, synthetic construct
  misc_feature 1..19: note = Description of Artificial Sequence: Synthetic oligonucleotide
  source 1..19: mol_type = other RNA
ggattgatggcggctggtc

SEQ ID NO: 5201 - RNA, 19 nt, synthetic construct
  misc_feature 1..19: note = Description of Artificial Sequence: Synthetic oligonucleotide
  source 1..19: mol_type = other RNA
aggattgatggcggctggt

SEQ ID NO: 5202 - RNA, 19 nt, synthetic construct
  misc_feature 1..19: note = Description of Artificial Sequence: Synthetic oligonucleotide
  source 1..19: mol_type = other RNA
caggattgatggcggctgg

SEQ ID NO: 5203 - RNA, 19 nt, synthetic construct
  misc_feature 1..19: note = Description of Artificial Sequence: Synthetic oligonucleotide
  source 1..19: mol_type = other RNA
ccaggattgatggcggctg

SEQ ID NO: 5204 - RNA, 19 nt, synthetic construct
  misc_feature 1..19: note = Description of Artificial Sequence: Synthetic oligonucleotide
  source 1..19: mol_type = other RNA
tccaggattgatggcggct

SEQ ID NO: 5205 - RNA, 19 nt, synthetic construct
  misc_feature 1..19: note = Description of Artificial Sequence: Synthetic oligonucleotide
  source 1..19: mol_type = other RNA
gtccaggattgatggcggc

SEQ ID NO: 5206 - RNA, 19 nt, synthetic construct
  misc_feature 1..19: note = Description of Artificial Sequence: Synthetic oligonucleotide
  source 1..19: mol_type = other RNA
ggtccaggattgatggcgg

SEQ ID NO: 5207 - RNA, 19 nt, synthetic construct
  misc_feature 1..19: note = Description of Artificial Sequence: Synthetic oligonucleotide
  source 1..19: mol_type = other RNA
gggtccaggattgatggcg

SEQ ID NO: 5208 - RNA, 19 nt, synthetic construct
  misc_feature 1..19: note = Description of Artificial Sequence: Synthetic oligonucleotide
  source 1..19: mol_type = other RNA
ggggtccaggattgatggc

SEQ ID NO: 5209 - RNA, 19 nt, synthetic construct
  misc_feature 1..19: note = Description of Artificial Sequence: Synthetic oligonucleotide
  source 1..19: mol_type = other RNA
gggggtccaggattgatgg

SEQ ID NO: 5210 - RNA, 19 nt, synthetic construct
  misc_feature 1..19: note = Description of Artificial Sequence: Synthetic oligonucleotide
  source 1..19: mol_type = other RNA
ggggggtccaggattgatg

SEQ ID NO: 5211 - RNA, 19 nt, synthetic construct
  misc_feature 1..19: note = Description of Artificial Sequence: Synthetic oligonucleotide
  source 1..19: mol_type = other RNA
tggggggtccaggattgat

SEQ ID NO: 5212 - RNA, 19 nt, synthetic construct
  misc_feature 1..19: note = Description of Artificial Sequence: Synthetic oligonucleotide
  source 1..19: mol_type = other RNA
ctggggggtccaggattga

SEQ ID NO: 5213 - RNA, 19 nt, synthetic construct
  misc_feature 1..19: note = Description of Artificial Sequence: Synthetic oligonucleotide
  source 1..19: mol_type = other RNA
tctggggggtccaggattg

SEQ ID NO: 5214 - RNA, 19 nt, synthetic construct
  misc_feature 1..19: note = Description of Artificial Sequence: Synthetic oligonucleotide
  source 1..19: mol_type = other RNA
gtctggggggtccaggatt

SEQ ID NO: 5215 - RNA, 19 nt, synthetic construct
  misc_feature 1..19: note = Description of Artificial Sequence: Synthetic oligonucleotide
  source 1..19: mol_type = other RNA
ggtctggggggtccaggat

SEQ ID NO: 5216 - RNA, 19 nt, synthetic construct
  misc_feature 1..19: note = Description of Artificial Sequence: Synthetic oligonucleotide
  source 1..19: mol_type = other RNA
tggtctggggggtccagga

SEQ ID NO: 5217 - RNA, 19 nt, synthetic construct
  misc_feature 1..19: note = Description of Artificial Sequence: Synthetic oligonucleotide
  source 1..19: mol_type = other RNA
ctggtctggggggtccagg

SEQ ID NO: 5218 - RNA, 19 nt, synthetic construct
  misc_feature 1..19: note = Description of Artificial Sequence: Synthetic oligonucleotide
  source 1..19: mol_type = other RNA
cctggtctggggggtccag

SEQ ID NO: 5219 - RNA, 19 nt, synthetic construct
  misc_feature 1..19: note = Description of Artificial Sequence: Synthetic oligonucleotide
  source 1..19: mol_type = other RNA
acctggtctggggggtcca

SEQ ID NO: 5220 - RNA, 19 nt, synthetic construct
  misc_feature 1..19: note = Description of Artificial Sequence: Synthetic oligonucleotide
  source 1..19: mol_type = other RNA
cacctggtctggggggtcc

SEQ ID NO: 5221 - RNA, 19 nt, synthetic construct
  misc_feature 1..19: note = Description of Artificial Sequence: Synthetic oligonucleotide
  source 1..19: mol_type = other RNA
gcacctggtctggggggtc

SEQ ID NO: 5222 - RNA, 19 nt, synthetic construct
  misc_feature 1..19: note = Description of Artificial Sequence: Synthetic oligonucleotide
  source 1..19: mol_type = other RNA
tgcacctggtctggggggt

SEQ ID NO: 5223 - RNA, 19 nt, synthetic construct
  misc_feature 1..19: note = Description of Artificial Sequence: Synthetic oligonucleotide
  source 1..19: mol_type = other RNA
ctgcacctggtctgggggg

SEQ ID NO: 5224 - RNA, 19 nt, synthetic construct
  misc_feature 1..19: note = Description of Artificial Sequence: Synthetic oligonucleotide
  source 1..19: mol_type = other RNA
actgcacctggtctggggg

SEQ ID NO: 5225 - RNA, 19 nt, synthetic construct
  misc_feature 1..19: note = Description of Artificial Sequence: Synthetic oligonucleotide
  source 1..19: mol_type = other RNA
aactgcacctggtctgggg

SEQ ID NO: 5226 - RNA, 19 nt, synthetic construct
  misc_feature 1..19: note = Description of Artificial Sequence: Synthetic oligonucleotide
  source 1..19: mol_type = other RNA
aaactgcacctggtctggg

SEQ ID NO: 5227 - RNA, 19 nt, synthetic construct
  misc_feature 1..19: note = Description of Artificial Sequence: Synthetic oligonucleotide
  source 1..19: mol_type = other RNA
caaactgcacctggtctgg

SEQ ID NO: 5228 - RNA, 19 nt, synthetic construct
  misc_feature 1..19: note = Description of Artificial Sequence: Synthetic oligonucleotide
  source 1..19: mol_type = other RNA
tcaaactgcacctggtctg

SEQ ID NO: 5229 - RNA, 19 nt, synthetic construct
  misc_feature 1..19: note = Description of Artificial Sequence: Synthetic oligonucleotide
  source 1..19: mol_type = other RNA
ctcaaactgcacctggtct

SEQ ID NO: 5230 - RNA, 19 nt, synthetic construct
  misc_feature 1..19: note = Description of Artificial Sequence: Synthetic oligonucleotide
  source 1..19: mol_type = other RNA
tctcaaactgcacctggtc

SEQ ID NO: 5231 - RNA, 19 nt, synthetic construct
  misc_feature 1..19: note = Description of Artificial Sequence: Synthetic oligonucleotide
  source 1..19: mol_type = other RNA
ttctcaaactgcacctggt

SEQ ID NO: 5232 - RNA, 19 nt, synthetic construct
  misc_feature 1..19: note = Description of Artificial Sequence: Synthetic oligonucleotide
  source 1..19: mol_type = other RNA
cttctcaaactgcacctgg

SEQ ID NO: 5233 - RNA, 19 nt, synthetic construct
  misc_feature 1..19: note = Description of Artificial Sequence: Synthetic oligonucleotide
  source 1..19: mol_type = other RNA
acttctcaaactgcacctg

SEQ ID NO: 5234 - RNA, 19 nt, synthetic construct
  misc_feature 1..19: note = Description of Artificial Sequence: Synthetic oligonucleotide
  source 1..19: mol_type = other RNA
cacttctcaaactgcacct

SEQ ID NO: 5235 - RNA, 19 nt, synthetic construct
  misc_feature 1..19: note = Description of Artificial Sequence: Synthetic oligonucleotide
  source 1..19: mol_type = other RNA
acacttctcaaactgcacc

SEQ ID NO: 5236 - RNA, 19 nt, synthetic construct
  misc_feature 1..19: note = Description of Artificial Sequence: Synthetic oligonucleotide
  source 1..19: mol_type = other RNA
cacacttctcaaactgcac

SEQ ID NO: 5237 - RNA, 19 nt, synthetic construct
  misc_feature 1..19: note = Description of Artificial Sequence: Synthetic oligonucleotide
  source 1..19: mol_type = other RNA
ccacacttctcaaactgca

SEQ ID NO: 5238 - RNA, 19 nt, synthetic construct
  misc_feature 1..19: note = Description of Artificial Sequence: Synthetic oligonucleotide
  source 1..19: mol_type = other RNA
gccacacttctcaaactgc

SEQ ID NO: 5239 - RNA, 19 nt, synthetic construct
  misc_feature 1..19: note = Description of Artificial Sequence: Synthetic oligonucleotide
  source 1..19: mol_type = other RNA
tgccacacttctcaaactg

SEQ ID NO: 5240 - RNA, 19 nt, synthetic construct
  misc_feature 1..19: note = Description of Artificial Sequence: Synthetic oligonucleotide
  source 1..19: mol_type = other RNA
ttgccacacttctcaaact

SEQ ID NO: 5241 - RNA, 19 nt, synthetic construct
  misc_feature 1..19: note = Description of Artificial Sequence: Synthetic oligonucleotide
  source 1..19: mol_type = other RNA
cttgccacacttctcaaac

SEQ ID NO: 5242 - RNA, 19 nt, synthetic construct
  misc_feature 1..19: note = Description of Artificial Sequence: Synthetic oligonucleotide
  source 1..19: mol_type = other RNA
tcttgccacacttctcaaa

SEQ ID NO: 5243 - RNA, 19 nt, synthetic construct
  misc_feature 1..19: note = Description of Artificial Sequence: Synthetic oligonucleotide
  source 1..19: mol_type = other RNA
ctcttgccacacttctcaa

SEQ ID NO: 5244 - RNA, 19 nt, synthetic construct
  misc_feature 1..19: note = Description of Artificial Sequence: Synthetic oligonucleotide
  source 1..19: mol_type = other RNA
cctcttgccacacttctca

SEQ ID NO: 5245 - RNA, 19 nt, synthetic construct
  misc_feature 1..19: note = Description of Artificial Sequence: Synthetic oligonucleotide
  source 1..19: mol_type = other RNA
ccctcttgccacacttctc

SEQ ID NO: 5246 - RNA, 19 nt, synthetic construct
  misc_feature 1..19: note = Description of Artificial Sequence: Synthetic oligonucleotide
  source 1..19: mol_type = other RNA
accctcttgccacacttct

SEQ ID NO: 5247 - RNA, 19 nt, synthetic construct
  misc_feature 1..19: note = Description of Artificial Sequence: Synthetic oligonucleotide
  source 1..19: mol_type = other RNA
caccctcttgccacacttc

SEQ ID NO: 5248 - RNA, 19 nt, synthetic construct
  misc_feature 1..19: note = Description of Artificial Sequence: Synthetic oligonucleotide
  source 1..19: mol_type = other RNA
ccaccctcttgccacactt

SEQ ID NO: 5249 - RNA, 19 nt, synthetic construct
  misc_feature 1..19: note = Description of Artificial Sequence: Synthetic oligonucleotide
  source 1..19: mol_type = other RNA
tccaccctcttgccacact

SEQ ID NO: 5250 - RNA, 19 nt, synthetic construct
  misc_feature 1..19: note = Description of Artificial Sequence: Synthetic oligonucleotide
  source 1..19: mol_type = other RNA
atccaccctcttgccacac

SEQ ID NO: 5251 - RNA, 19 nt, synthetic construct
  misc_feature 1..19: note = Description of Artificial Sequence: Synthetic oligonucleotide
  source 1..19: mol_type = other RNA
gatccaccctcttgccaca

SEQ ID NO: 5252 - RNA, 19 nt, synthetic construct
  misc_feature 1..19: note = Description of Artificial Sequence: Synthetic oligonucleotide
  source 1..19: mol_type = other RNA
cgatccaccctcttgccac

SEQ ID NO: 5253 - RNA, 19 nt, synthetic construct
  misc_feature 1..19: note = Description of Artificial Sequence: Synthetic oligonucleotide
  source 1..19: mol_type = other RNA
ccgatccaccctcttgcca

SEQ ID NO: 5254 - RNA, 19 nt, synthetic construct
  misc_feature 1..19: note = Description of Artificial Sequence: Synthetic oligonucleotide
  source 1..19: mol_type = other RNA
gccgatccaccctcttgcc

SEQ ID NO: 5255 - RNA, 19 nt, synthetic construct
  misc_feature 1..19: note = Description of Artificial Sequence: Synthetic oligonucleotide
  source 1..19: mol_type = other RNA
agccgatccaccctcttgc

SEQ ID NO: 5256 - RNA, 19 nt, synthetic construct
  misc_feature 1..19: note = Description of Artificial Sequence: Synthetic oligonucleotide
  source 1..19: mol_type = other RNA
cagccgatccaccctcttg

SEQ ID NO: 5257 - RNA, 19 nt, synthetic construct
  misc_feature 1..19: note = Description of Artificial Sequence: Synthetic oligonucleotide
  source 1..19: mol_type = other RNA
ccagccgatccaccctctt

SEQ ID NO: 5258 - RNA, 19 nt, synthetic construct
  misc_feature 1..19: note = Description of Artificial Sequence: Synthetic oligonucleotide
  source 1..19: mol_type = other RNA
tccagccgatccaccctct

SEQ ID NO: 5259 - RNA, 19 nt, synthetic construct
  misc_feature 1..19: note = Description of Artificial Sequence: Synthetic oligonucleotide
  source 1..19: mol_type = other RNA
atccagccgatccaccctc

SEQ ID NO: 5260 - RNA, 19 nt, synthetic construct
  misc_feature 1..19: note = Description of Artificial Sequence: Synthetic oligonucleotide
  source 1..19: mol_type = other RNA
gatccagccgatccaccct

SEQ ID NO: 5261 - RNA, 19 nt, synthetic construct
  misc_feature 1..19: note = Description of Artificial Sequence: Synthetic oligonucleotide
  source 1..19: mol_type = other RNA
tgatccagccgatccaccc

SEQ ID NO: 5262 - RNA, 19 nt, synthetic construct
  misc_feature 1..19: note = Description of Artificial Sequence: Synthetic oligonucleotide
  source 1..19: mol_type = other RNA
ctgatccagccgatccacc

SEQ ID NO: 5263 - RNA, 19 nt, synthetic construct
  misc_feature 1..19: note = Description of Artificial Sequence: Synthetic oligonucleotide
  source 1..19: mol_type = other RNA
gctgatccagccgatccac

SEQ ID NO: 5264 - RNA, 19 nt, synthetic construct
  misc_feature 1..19: note = Description of Artificial Sequence: Synthetic oligonucleotide
  source 1..19: mol_type = other RNA
cgctgatccagccgatcca

SEQ ID NO: 5265 - RNA, 19 nt, synthetic construct
  misc_feature 1..19: note = Description of Artificial Sequence: Synthetic oligonucleotide
  source 1..19: mol_type = other RNA
ccgctgatccagccgatcc

SEQ ID NO: 5266 - RNA, 19 nt, synthetic construct
  misc_feature 1..19: note = Description of Artificial Sequence: Synthetic oligonucleotide
  source 1..19: mol_type = other RNA
gccgctgatccagccgatc

SEQ ID NO: 5267 - RNA, 19 nt, synthetic construct
  misc_feature 1..19: note = Description of Artificial Sequence: Synthetic oligonucleotide
  source 1..19: mol_type = other RNA
cgccgctgatccagccgat

SEQ ID NO: 5268 - RNA, 19 nt, synthetic construct
  misc_feature 1..19: note = Description of Artificial Sequence: Synthetic oligonucleotide
  source 1..19: mol_type = other RNA
acgccgctgatccagccga

SEQ ID NO: 5269 - RNA, 19 nt, synthetic construct
  misc_feature 1..19: note = Description of Artificial Sequence: Synthetic oligonucleotide
  source 1..19: mol_type = other RNA
aacgccgctgatccagccg

SEQ ID NO: 5270 - RNA, 19 nt, synthetic construct
  misc_feature 1..19: note = Description of Artificial Sequence: Synthetic oligonucleotide
  source 1..19: mol_type = other RNA
gaacgccgctgatccagcc

SEQ ID NO: 5271 - RNA, 19 nt, synthetic construct
  misc_feature 1..19: note = Description of Artificial Sequence: Synthetic oligonucleotide
  source 1..19: mol_type = other RNA
ggaacgccgctgatccagc

SEQ ID NO: 5272 - RNA, 19 nt, synthetic construct
  misc_feature 1..19: note = Description of Artificial Sequence: Synthetic oligonucleotide
  source 1..19: mol_type = other RNA
tggaacgccgctgatccag

SEQ ID NO: 5273 - RNA, 19 nt, synthetic construct
  misc_feature 1..19: note = Description of Artificial Sequence: Synthetic oligonucleotide
  source 1..19: mol_type = other RNA
ttggaacgccgctgatcca

SEQ ID NO: 5274 - RNA, 19 nt, synthetic construct
  misc_feature 1..19: note = Description of Artificial Sequence: Synthetic oligonucleotide
  source 1..19: mol_type = other RNA
cttggaacgccgctgatcc

SEQ ID NO: 5275 - RNA, 19 nt, synthetic construct
  misc_feature 1..19: note = Description of Artificial Sequence: Synthetic oligonucleotide
  source 1..19: mol_type = other RNA
gcttggaacgccgctgatc

SEQ ID NO: 5276 - RNA, 19 nt, synthetic construct
  misc_feature 1..19: note = Description of Artificial Sequence: Synthetic oligonucleotide
  source 1..19: mol_type = other RNA
agcttggaacgccgctgat

SEQ ID NO: 5277 - RNA, 19 nt, synthetic construct
  misc_feature 1..19: note = Description of Artificial Sequence: Synthetic oligonucleotide
  source 1..19: mol_type = other RNA
cagcttggaacgccgctga

SEQ ID NO: 5278 - RNA, 19 nt, synthetic construct
  misc_feature 1..19: note = Description of Artificial Sequence: Synthetic oligonucleotide
  source 1..19: mol_type = other RNA
gcagcttggaacgccgctg

SEQ ID NO: 5279 - RNA, 19 nt, synthetic construct
  misc_feature 1..19: note = Description of Artificial Sequence: Synthetic oligonucleotide
  source 1..19: mol_type = other RNA
cgcagcttggaacgccgct

SEQ ID NO: 5280 - RNA, 19 nt, synthetic construct
  misc_feature 1..19: note = Description of Artificial Sequence: Synthetic oligonucleotide
  source 1..19: mol_type = other RNA
gcgcagcttggaacgccgc

SEQ ID NO: 5281 - RNA, 19 nt, synthetic construct
  misc_feature 1..19: note = Description of Artificial Sequence: Synthetic oligonucleotide
  source 1..19: mol_type = other RNA
cgcgcagcttggaacgccg

SEQ ID NO: 5282 - RNA, 19 nt, synthetic construct
  misc_feature 1..19: note = Description of Artificial Sequence: Synthetic oligonucleotide
  source 1..19: mol_type = other RNA
acgcgcagcttggaacgcc

SEQ ID NO: 5283 - RNA, 19 nt, synthetic construct
  misc_feature 1..19: note = Description of Artificial Sequence: Synthetic oligonucleotide
  source 1..19: mol_type = other RNA
cacgcgcagcttggaacgc

SEQ ID NO: 5284 - RNA, 19 nt, synthetic construct
  misc_feature 1..19: note = Description of Artificial Sequence: Synthetic oligonucleotide
  source 1..19: mol_type = other RNA
ccacgcgcagcttggaacg

SEQ ID NO: 5285 - RNA, 19 nt, synthetic construct
  misc_feature 1..19: note = Description of Artificial Sequence: Synthetic oligonucleotide
  source 1..19: mol_type = other RNA
accacgcgcagcttggaac

SEQ ID NO: 5286 - RNA, 19 nt, synthetic construct
  misc_feature 1..19: note = Description of Artificial Sequence: Synthetic oligonucleotide
  source 1..19: mol_type = other RNA
aaccacgcgcagcttggaa

SEQ ID NO: 5287 - RNA, 19 nt, synthetic construct
  misc_feature 1..19: note = Description of Artificial Sequence: Synthetic oligonucleotide
  source 1..19: mol_type = other RNA
caaccacgcgcagcttgga

SEQ ID NO: 5288 - RNA, 19 nt, synthetic construct
  misc_feature 1..19: note = Description of Artificial Sequence: Synthetic oligonucleotide
  source 1..19: mol_type = other RNA
ccaaccacgcgcagcttgg

SEQ ID NO: 5289 - RNA, 19 nt, synthetic construct
  misc_feature 1..19: note = Description of Artificial Sequence: Synthetic oligonucleotide
  source 1..19: mol_type = other RNA
cccaaccacgcgcagcttg

SEQ ID NO: 5290 - RNA, 19 nt, synthetic construct
  misc_feature 1..19: note = Description of Artificial Sequence: Synthetic oligonucleotide
  source 1..19: mol_type = other RNA
ccccaaccacgcgcagctt

SEQ ID NO: 5291 - RNA, 19 nt, synthetic construct
  misc_feature 1..19: note = Description of Artificial Sequence: Synthetic oligonucleotide
  source 1..19: mol_type = other RNA
cccccaaccacgcgcagct

SEQ ID NO: 5292 - RNA, 19 nt, synthetic construct
  misc_feature 1..19: note = Description of Artificial Sequence: Synthetic oligonucleotide
  source 1..19: mol_type = other RNA
gcccccaaccacgcgcagc

SEQ ID NO: 5293 - RNA, 19 nt, synthetic construct
  misc_feature 1..19: note = Description of Artificial Sequence: Synthetic oligonucleotide
  source 1..19: mol_type = other RNA
ggcccccaaccacgcgcag

SEQ ID NO: 5294 - RNA, 19 nt, synthetic construct
  misc_feature 1..19: note = Description of Artificial Sequence: Synthetic oligonucleotide
  source 1..19: mol_type = other RNA
tggcccccaaccacgcgca

SEQ ID NO: 5295 - RNA, 19 nt, synthetic construct
  misc_feature 1..19: note = Description of Artificial Sequence: Synthetic oligonucleotide
  source 1..19: mol_type = other RNA
atggcccccaaccacgcgc

SEQ ID NO: 5296 - RNA, 19 nt, synthetic construct
  misc_feature 1..19: note = Description of Artificial Sequence: Synthetic oligonucleotide
  source 1..19: mol_type = other RNA
gatggcccccaaccacgcg

SEQ ID NO: 5297 - RNA, 19 nt, synthetic construct
  misc_feature 1..19: note = Description of Artificial Sequence: Synthetic oligonucleotide
  source 1..19: mol_type = other RNA
ggatggcccccaaccacgc

SEQ ID NO: 5298 - RNA, 19 nt, synthetic construct
  misc_feature 1..19: note = Description of Artificial Sequence: Synthetic oligonucleotide
  source 1..19: mol_type = other RNA
cggatggcccccaaccacg

SEQ ID NO: 5299 - RNA, 19 nt, synthetic construct
  misc_feature 1..19: note = Description of Artificial Sequence: Synthetic oligonucleotide
  source 1..19: mol_type = other RNA
ccggatggcccccaaccac

SEQ ID NO: 5300 - RNA, 19 nt, synthetic construct
  misc_feature 1..19: note = Description of Artificial Sequence: Synthetic oligonucleotide
  source 1..19: mol_type = other RNA
cccggatggcccccaacca

SEQ ID NO: 5301 - RNA, 19 nt, synthetic construct
  misc_feature 1..19: note = Description of Artificial Sequence: Synthetic oligonucleotide
  source 1..19: mol_type = other RNA
gcccggatggcccccaacc

SEQ ID NO: 5302 - RNA, 19 nt, synthetic construct
  misc_feature 1..19: note = Description of Artificial Sequence: Synthetic oligonucleotide
  source 1..19: mol_type = other RNA
tgcccggatggcccccaac

SEQ ID NO: 5303 - RNA, 19 nt, synthetic construct
  misc_feature 1..19: note = Description of Artificial Sequence: Synthetic oligonucleotide
  source 1..19: mol_type = other RNA
ttgcccggatggcccccaa

SEQ ID NO: 5304 - RNA, 19 nt, synthetic construct
  misc_feature 1..19: note = Description of Artificial Sequence: Synthetic oligonucleotide
  source 1..19: mol_type = other RNA
gttgcccggatggccccca

SEQ ID NO: 5305 - RNA, 19 nt, synthetic construct
  misc_feature 1..19: note = Description of Artificial Sequence: Synthetic oligonucleotide
  source 1..19: mol_type = other RNA
agttgcccggatggccccc

SEQ ID NO: 5306 - RNA, 19 nt, synthetic construct
  misc_feature 1..19: note = Description of Artificial Sequence: Synthetic oligonucleotide
  source 1..19: mol_type = other RNA
gagttgcccggatggcccc

SEQ ID NO: 5307 - RNA, 19 nt, synthetic construct
  misc_feature 1..19: note = Description of Artificial Sequence: Synthetic oligonucleotide
  source 1..19: mol_type = other RNA
tgagttgcccggatggccc

SEQ ID NO: 5308 - RNA, 19 nt, synthetic construct
  misc_feature 1..19: note = Description of Artificial Sequence: Synthetic oligonucleotide
  source 1..19: mol_type = other RNA
gtgagttgcccggatggcc

SEQ ID NO: 5309 - RNA, 19 nt, synthetic construct
  misc_feature 1..19: note = Description of Artificial Sequence: Synthetic oligonucleotide
  source 1..19: mol_type = other RNA
ggtgagttgcccggatggc

SEQ ID NO: 5310 - RNA, 19 nt, synthetic construct
  misc_feature 1..19: note = Description of Artificial Sequence: Synthetic oligonucleotide
  source 1..19: mol_type = other RNA
gggtgagttgcccggatgg

SEQ ID NO: 5311 - RNA, 19 nt, synthetic construct
  misc_feature 1..19: note = Description of Artificial Sequence: Synthetic oligonucleotide
  source 1..19: mol_type = other RNA
agggtgagttgcccggatg

SEQ ID NO: 5312 - RNA, 19 nt, synthetic construct
  misc_feature 1..19: note = Description of Artificial Sequence: Synthetic oligonucleotide
  source 1..19: mol_type = other RNA
cagggtgagttgcccggat

SEQ ID NO: 5313 - RNA, 19 nt, synthetic construct
  misc_feature 1..19: note = Description of Artificial Sequence: Synthetic oligonucleotide
  source 1..19: mol_type = other RNA
ccagggtgagttgcccgga

SEQ ID NO: 5314 - RNA, 19 nt, synthetic construct
  misc_feature 1..19: note = Description of Artificial Sequence: Synthetic oligonucleotide
  source 1..19: mol_type = other RNA
tccagggtgagttgcccgg

SEQ ID NO: 5315 - RNA, 19 nt, synthetic construct
  misc_feature 1..19: note = Description of Artificial Sequence: Synthetic oligonucleotide
  source 1..19: mol_type = other RNA
gtccagggtgagttgcccg

SEQ ID NO: 5316 - RNA, 19 nt, synthetic construct
  misc_feature 1..19: note = Description of Artificial Sequence: Synthetic oligonucleotide
  source 1..19: mol_type = other RNA
tgtccagggtgagttgccc

SEQ ID NO: 5317 - RNA, 19 nt, synthetic construct
  misc_feature 1..19: note = Description of Artificial Sequence: Synthetic oligonucleotide
  source 1..19: mol_type = other RNA
ctgtccagggtgagttgcc

SEQ ID NO: 5318 - RNA, 19 nt, synthetic construct
  misc_feature 1..19: note = Description of Artificial Sequence: Synthetic oligonucleotide
  source 1..19: mol_type = other RNA
actgtccagggtgagttgc

SEQ ID NO: 5319 - RNA, 19 nt, synthetic construct
  misc_feature 1..19: note = Description of Artificial Sequence: Synthetic oligonucleotide
  source 1..19: mol_type = other RNA
gactgtccagggtgagttg

SEQ ID NO: 5320 - RNA, 19 nt, synthetic construct
  misc_feature 1..19: note = Description of Artificial Sequence: Synthetic oligonucleotide
  source 1..19: mol_type = other RNA
tgactgtccagggtgagtt

SEQ ID NO: 5321 - RNA, 19 nt, synthetic construct
  misc_feature 1..19: note = Description of Artificial Sequence: Synthetic oligonucleotide
  source 1..19: mol_type = other RNA
ctgactgtccagggtgagt

SEQ ID NO: 5322 - RNA, 19 nt, synthetic construct
  misc_feature 1..19: note = Description of Artificial Sequence: Synthetic oligonucleotide
  source 1..19: mol_type = other RNA
gctgactgtccagggtgag

SEQ ID NO: 5323 - RNA, 19 nt, synthetic construct
  misc_feature 1..19: note = Description of Artificial Sequence: Synthetic oligonucleotide
  source 1..19: mol_type = other RNA
agctgactgtccagggtga

SEQ ID NO: 5324 - RNA, 19 nt, synthetic construct
  misc_feature 1..19: note = Description of Artificial Sequence: Synthetic oligonucleotide
  source 1..19: mol_type = other RNA
aagctgactgtccagggtg

SEQ ID NO: 5325 - RNA, 19 nt, synthetic construct
  misc_feature 1..19: note = Description of Artificial Sequence: Synthetic oligonucleotide
  source 1..19: mol_type = other RNA
caagctgactgtccagggt

SEQ ID NO: 5326 - RNA, 19 nt, synthetic construct
  misc_feature 1..19: note = Description of Artificial Sequence: Synthetic oligonucleotide
  source 1..19: mol_type = other RNA
gcaagctgactgtccaggg

SEQ ID NO: 5327 - RNA, 19 nt, synthetic construct
  misc_feature 1..19: note = Description of Artificial Sequence: Synthetic oligonucleotide
  source 1..19: mol_type = other RNA
cgcaagctgactgtccagg

SEQ ID NO: 5328 - RNA, 19 nt, synthetic construct
  misc_feature 1..19: note = Description of Artificial Sequence: Synthetic oligonucleotide
  source 1..19: mol_type = other RNA
ccgcaagctgactgtccag

SEQ ID NO: 5329 - RNA, 19 nt, synthetic construct
  misc_feature 1..19: note = Description of Artificial Sequence: Synthetic oligonucleotide
  source 1..19: mol_type = other RNA
tccgcaagctgactgtcca

SEQ ID NO: 5330 - RNA, 19 nt, synthetic construct
  misc_feature 1..19: note = Description of Artificial Sequence: Synthetic oligonucleotide
  source 1..19: mol_type = other RNA
ttccgcaagctgactgtcc

SEQ ID NO: 5331 - RNA, 19 nt, synthetic construct
  misc_feature 1..19: note = Description of Artificial Sequence: Synthetic oligonucleotide
  source 1..19: mol_type = other RNA
attccgcaagctgactgtc

SEQ ID NO: 5332 - RNA, 19 nt, synthetic construct
  misc_feature 1..19: note = Description of Artificial Sequence: Synthetic oligonucleotide
  source 1..19: mol_type = other RNA
gattccgcaagctgactgt

SEQ ID NO: 5333 - RNA, 19 nt, synthetic construct
  misc_feature 1..19: note = Description of Artificial Sequence: Synthetic oligonucleotide
  source 1..19: mol_type = other RNA
cgattccgcaagctgactg

SEQ ID NO: 5334 - RNA, 19 nt, synthetic construct
  misc_feature 1..19: note = Description of Artificial Sequence: Synthetic oligonucleotide
  source 1..19: mol_type = other RNA
ccgattccgcaagctgact

SEQ ID NO: 5335 - RNA, 19 nt, synthetic construct
  misc_feature 1..19: note = Description of Artificial Sequence: Synthetic oligonucleotide
  source 1..19: mol_type = other RNA
gccgattccgcaagctgac

SEQ ID NO: 5336 - RNA, 19 nt, synthetic construct
  misc_feature 1..19: note = Description of Artificial Sequence: Synthetic oligonucleotide
  source 1..19: mol_type = other RNA
tgccgattccgcaagctga

SEQ ID NO: 5337 - RNA, 19 nt, synthetic construct
  misc_feature 1..19: note = Description of Artificial Sequence: Synthetic oligonucleotide
  source 1..19: mol_type = other RNA
ctgccgattccgcaagctg

SEQ ID NO: 5338 - RNA, 19 nt, synthetic construct
  misc_feature 1..19: note = Description of Artificial Sequence: Synthetic oligonucleotide
  source 1..19: mol_type = other RNA
cctgccgattccgcaagct

SEQ ID NO: 5339 - RNA, 19 nt, synthetic construct
  misc_feature 1..19: note = Description of Artificial Sequence: Synthetic oligonucleotide
  source 1..19: mol_type = other RNA
ccctgccgattccgcaagc

SEQ ID NO: 5340 - RNA, 19 nt, synthetic construct
  misc_feature 1..19: note = Description of Artificial Sequence: Synthetic oligonucleotide
  source 1..19: mol_type = other RNA
gccctgccgattccgcaag

SEQ ID NO: 5341 - RNA, 19 nt, synthetic construct
  misc_feature 1..19: note = Description of Artificial Sequence: Synthetic oligonucleotide
  source 1..19: mol_type = other RNA
ggccctgccgattccgcaa

SEQ ID NO: 5342 - RNA, 19 nt, synthetic construct
  misc_feature 1..19: note = Description of Artificial Sequence: Synthetic oligonucleotide
  source 1..19: mol_type = other RNA
tggccctgccgattccgca

SEQ ID NO: 5343 - RNA, 19 nt, synthetic construct
  misc_feature 1..19: note = Description of Artificial Sequence: Synthetic oligonucleotide
  source 1..19: mol_type = other RNA
ctggccctgccgattccgc

SEQ ID NO: 5344 - RNA, 19 nt, synthetic construct
  misc_feature 1..19: note = Description of Artificial Sequence: Synthetic oligonucleotide
  source 1..19: mol_type = other RNA
gctggccctgccgattccg

SEQ ID NO: 5345 - RNA, 19 nt, synthetic construct
  misc_feature 1..19: note = Description of Artificial Sequence: Synthetic oligonucleotide
  source 1..19: mol_type = other RNA
tgctggccctgccgattcc

SEQ ID NO: 5346 - RNA, 19 nt, synthetic construct
  misc_feature 1..19: note = Description of Artificial Sequence: Synthetic oligonucleotide
  source 1..19: mol_type = other RNA
atgctggccctgccgattc

SEQ ID NO: 5347 - RNA, 19 nt, synthetic construct
  misc_feature 1..19: note = Description of Artificial Sequence: Synthetic oligonucleotide
  source 1..19: mol_type = other RNA
aatgctggccctgccgatt

SEQ ID NO: 5348 - RNA, 19 nt, synthetic construct
  misc_feature 1..19: note = Description of Artificial Sequence: Synthetic oligonucleotide
  source 1..19: mol_type = other RNA
aaatgctggccctgccgat

SEQ ID NO: 5349 - RNA, 19 nt, synthetic construct
  misc_feature 1..19: note = Description of Artificial Sequence: Synthetic oligonucleotide
  source 1..19: mol_type = other RNA
gaaatgctggccctgccga

SEQ ID NO: 5350 - RNA, 19 nt, synthetic construct
  misc_feature 1..19: note = Description of Artificial Sequence: Synthetic oligonucleotide
  source 1..19: mol_type = other RNA
agaaatgctggccctgccg

SEQ ID NO: 5351 - RNA, 19 nt, synthetic construct
  misc_feature 1..19: note = Description of Artificial Sequence: Synthetic oligonucleotide
  source 1..19: mol_type = other RNA
cagaaatgctggccctgcc

SEQ ID NO: 5352 - RNA, 19 nt, synthetic construct
  misc_feature 1..19: note = Description of Artificial Sequence: Synthetic oligonucleotide
  source 1..19: mol_type = other RNA
gcagaaatgctggccctgc

SEQ ID NO: 5353 - RNA, 19 nt, synthetic construct
  misc_feature 1..19: note = Description of Artificial Sequence: Synthetic oligonucleotide
  source 1..19: mol_type = other RNA
cgcagaaatgctggccctg

SEQ ID NO: 5354 - RNA, 19 nt, synthetic construct
  misc_feature 1..19: note = Description of Artificial Sequence: Synthetic oligonucleotide
  source 1..19: mol_type = other RNA
ccgcagaaatgctggccct

SEQ ID NO: 5355 - RNA, 19 nt, synthetic construct
  misc_feature 1..19: note = Description of Artificial Sequence: Synthetic oligonucleotide
  source 1..19: mol_type = other RNA
cccgcagaaatgctggccc

SEQ ID NO: 5356 - RNA, 19 nt, synthetic construct
  misc_feature 1..19: note = Description of Artificial Sequence: Synthetic oligonucleotide
  source 1..19: mol_type = other RNA
ccccgcagaaatgctggcc

SEQ ID NO: 5357 - RNA, 19 nt, synthetic construct
  misc_feature 1..19: note = Description of Artificial Sequence: Synthetic oligonucleotide
  source 1..19: mol_type = other RNA
cccccgcagaaatgctggc

SEQ ID NO: 5358 - RNA, 19 nt, synthetic construct
  misc_feature 1..19: note = Description of Artificial Sequence: Synthetic oligonucleotide
  source 1..19: mol_type = other RNA
ccccccgcagaaatgctgg

SEQ ID NO: 5359 - RNA, 19 nt, synthetic construct
  misc_feature 1..19: note = Description of Artificial Sequence: Synthetic oligonucleotide
  source 1..19: mol_type = other RNA
accccccgcagaaatgctg

SEQ ID NO: 5360 - RNA, 19 nt, synthetic construct
  misc_feature 1..19: note = Description of Artificial Sequence: Synthetic oligonucleotide
  source 1..19: mol_type = other RNA
gaccccccgcagaaatgct

SEQ ID NO: 5361 - RNA, 19 nt, synthetic construct
  misc_feature 1..19: note = Description of Artificial Sequence: Synthetic oligonucleotide
  source 1..19: mol_type = other RNA
agaccccccgcagaaatgc

SEQ ID NO: 5362 - RNA, 19 nt, synthetic construct
  misc_feature 1..19: note = Description of Artificial Sequence: Synthetic oligonucleotide
  source 1..19: mol_type = other RNA
gagaccccccgcagaaatg

SEQ ID NO: 5363 - RNA, 19 nt, synthetic construct
  misc_feature 1..19: note = Description of Artificial Sequence: Synthetic oligonucleotide
  source 1..19: mol_type = other RNA
agagaccccccgcagaaat

SEQ ID NO: 5364 - RNA, 19 nt, synthetic construct
  misc_feature 1..19: note = Description of Artificial Sequence: Synthetic oligonucleotide
  source 1..19: mol_type = other RNA
tagagaccccccgcagaaa

SEQ ID NO: 5365 - RNA, 19 nt, synthetic construct
  misc_feature 1..19: note = Description of Artificial Sequence: Synthetic oligonucleotide
  source 1..19: mol_type = other RNA
ctagagaccccccgcagaa

SEQ ID NO: 5366 - RNA, 19 nt, synthetic construct
  misc_feature 1..19: note = Description of Artificial Sequence: Synthetic oligonucleotide
  source 1..19: mol_type = other RNA
actagagaccccccgcaga

SEQ ID NO: 5367 - RNA, 19 nt, synthetic construct
  misc_feature 1..19: note = Description of Artificial Sequence: Synthetic oligonucleotide
  source 1..19: mol_type = other RNA
cactagagaccccccgcag

SEQ ID NO: 5368 - RNA, 19 nt, synthetic construct
  misc_feature 1..19: note = Description of Artificial Sequence: Synthetic oligonucleotide
  source 1..19: mol_type = other RNA
tcactagagaccccccgca

SEQ ID NO: 5369 - RNA, 19 nt, synthetic construct
  misc_feature 1..19: note = Description of Artificial Sequence: Synthetic oligonucleotide
  source 1..19: mol_type = other RNA
ttcactagagaccccccgc

SEQ ID NO: 5370 - RNA, 19 nt, synthetic construct
  misc_feature 1..19: note = Description of Artificial Sequence: Synthetic oligonucleotide
  source 1..19: mol_type = other RNA
cttcactagagaccccccg

SEQ ID NO: 5371 - RNA, 19 nt, synthetic construct
  misc_feature 1..19: note = Description of Artificial Sequence: Synthetic oligonucleotide
  source 1..19: mol_type = other RNA
ccttcactagagacccccc

SEQ ID NO: 5372 - RNA, 19 nt, synthetic construct
  misc_feature 1..19: note = Description of Artificial Sequence: Synthetic oligonucleotide
  source 1..19: mol_type = other RNA
tccttcactagagaccccc

SEQ ID NO: 5373 - RNA, 19 nt, synthetic construct
  misc_feature 1..19: note = Description of Artificial Sequence: Synthetic oligonucleotide
  source 1..19: mol_type = other RNA
ctccttcactagagacccc

SEQ ID NO: 5374 - RNA, 19 nt, synthetic construct
  misc_feature 1..19: note = Description of Artificial Sequence: Synthetic oligonucleotide
  source 1..19: mol_type = other RNA
gctccttcactagagaccc

SEQ ID NO: 5375 - RNA, 19 nt, synthetic construct
  misc_feature 1..19: note = Description of Artificial Sequence: Synthetic oligonucleotide
  source 1..19: mol_type = other RNA
tgctccttcactagagacc

SEQ ID NO: 5376 - RNA, 19 nt, synthetic construct
  misc_feature 1..19: note = Description of Artificial Sequence: Synthetic oligonucleotide
  source 1..19: mol_type = other RNA
ctgctccttcactagagac

SEQ ID NO: 5377 - RNA, 19 nt, synthetic construct
  misc_feature 1..19: note = Description of Artificial Sequence: Synthetic oligonucleotide
  source 1..19: mol_type = other RNA
actgctccttcactagaga

SEQ ID NO: 5378 - RNA, 19 nt, synthetic construct
  misc_feature 1..19: note = Description of Artificial Sequence: Synthetic oligonucleotide
  source 1..19: mol_type = other RNA
cactgctccttcactagag

SEQ ID NO: 5379 - RNA, 19 nt, synthetic construct
  misc_feature 1..19: note = Description of Artificial Sequence: Synthetic oligonucleotide
  source 1..19: mol_type = other RNA
ccactgctccttcactaga

SEQ ID NO: 5380 - RNA, 19 nt, synthetic construct
  misc_feature 1..19: note = Description of Artificial Sequence: Synthetic oligonucleotide
  source 1..19: mol_type = other RNA
tccactgctccttcactag

SEQ ID NO: 5381 - RNA, 19 nt, synthetic construct
  misc_feature 1..19: note = Description of Artificial Sequence: Synthetic oligonucleotide
  source 1..19: mol_type = other RNA
atccactgctccttcacta

SEQ ID NO: 5382 - RNA, 19 nt, synthetic construct
  misc_feature 1..19: note = Description of Artificial Sequence: Synthetic oligonucleotide
  source 1..19: mol_type = other RNA
tatccactgctccttcact

SEQ ID NO: 5383 - RNA, 19 nt, synthetic construct
  misc_feature 1..19: note = Description of Artificial Sequence: Synthetic oligonucleotide
  source 1..19: mol_type = other RNA
gtatccactgctccttcac

SEQ ID NO: 5384 - RNA, 19 nt, synthetic construct
  misc_feature 1..19: note = Description of Artificial Sequence: Synthetic oligonucleotide
  source 1..19: mol_type = other RNA
agtatccactgctccttca

SEQ ID NO: 5385 - RNA, 19 nt, synthetic construct
  misc_feature 1..19: note = Description of Artificial Sequence: Synthetic oligonucleotide
  source 1..19: mol_type = other RNA
cagtatccactgctccttc

SEQ ID NO: 5386 - RNA, 19 nt, synthetic construct
  misc_feature 1..19: note = Description of Artificial Sequence: Synthetic oligonucleotide
  source 1..19: mol_type = other RNA
tcagtatccactgctcctt

SEQ ID NO: 5387 - RNA, 19 nt, synthetic construct
  misc_feature 1..19: note = Description of Artificial Sequence: Synthetic oligonucleotide
  source 1..19: mol_type = other RNA
gtcagtatccactgctcct

SEQ ID NO: 5388 - RNA, 19 nt, synthetic construct
  misc_feature 1..19: note = Description of Artificial Sequence: Synthetic oligonucleotide
  source 1..19: mol_type = other RNA
agtcagtatccactgctcc

SEQ ID NO: 5389 - RNA, 19 nt, synthetic construct
  misc_feature 1..19: note = Description of Artificial Sequence: Synthetic oligonucleotide
  source 1..19: mol_type = other RNA
cagtcagtatccactgctc

SEQ ID NO: 5390 - RNA, 19 nt, synthetic construct
  misc_feature 1..19: note = Description of Artificial Sequence: Synthetic oligonucleotide
  source 1..19: mol_type = other RNA
gcagtcagtatccactgct

SEQ ID NO: 5391 - RNA, 19 nt, synthetic construct
  misc_feature 1..19: note = Description of Artificial Sequence: Synthetic oligonucleotide
  source 1..19: mol_type = other RNA
ggcagtcagtatccactgc

SEQ ID NO: 5392 - RNA, 19 nt, synthetic construct
  misc_feature 1..19: note = Description of Artificial Sequence: Synthetic oligonucleotide
  source 1..19: mol_type = other RNA
gggcagtcagtatccactg

SEQ ID NO: 5393 - RNA, 19 nt, synthetic construct
  misc_feature 1..19: note = Description of Artificial Sequence: Synthetic oligonucleotide
  source 1..19: mol_type = other RNA
cgggcagtcagtatccact

SEQ ID NO: 5394 - RNA, 19 nt, synthetic construct
  misc_feature 1..19: note = Description of Artificial Sequence: Synthetic oligonucleotide
  source 1..19: mol_type = other RNA
ccgggcagtcagtatccac

SEQ ID NO: 5395 - RNA, 19 nt, synthetic construct
  misc_feature 1..19: note = Description of Artificial Sequence: Synthetic oligonucleotide
  source 1..19: mol_type = other RNA
gccgggcagtcagtatcca

SEQ ID NO: 5396 - RNA, 19 nt, synthetic construct
  misc_feature 1..19: note = Description of Artificial Sequence: Synthetic oligonucleotide
  source 1..19: mol_type = other RNA
tgccgggcagtcagtatcc

SEQ ID NO: 5397 - RNA, 19 nt, synthetic construct
  misc_feature 1..19: note = Description of Artificial Sequence: Synthetic oligonucleotide
  source 1..19: mol_type = other RNA
ctgccgggcagtcagtatc

SEQ ID NO: 5398 - RNA, 19 nt, synthetic construct
  misc_feature 1..19: note = Description of Artificial Sequence: Synthetic oligonucleotide
  source 1..19: mol_type = other RNA
actgccgggcagtcagtat

SEQ ID NO: 5399 - RNA, 19 nt, synthetic construct
  misc_feature 1..19: note = Description of Artificial Sequence: Synthetic oligonucleotide
  source 1..19: mol_type = other RNA
cactgccgggcagtcagta

SEQ ID NO: 5400 - RNA, 19 nt, synthetic construct
  misc_feature 1..19: note = Description of Artificial Sequence: Synthetic oligonucleotide
  source 1..19: mol_type = other RNA
gcactgccgggcagtcagt

SEQ ID NO: 5401 - RNA, 19 nt, synthetic construct
  misc_feature 1..19: note = Description of Artificial Sequence: Synthetic oligonucleotide
  source 1..19: mol_type = other RNA
agcactgccgggcagtcag

SEQ ID NO: 5402 - RNA, 19 nt, synthetic construct
  misc_feature 1..19: note = Description of Artificial Sequence: Synthetic oligonucleotide
  source 1..19: mol_type = other RNA
aagcactgccgggcagtca

SEQ ID NO: 5403 - RNA, 19 nt, synthetic construct
  misc_feature 1..19: note = Description of Artificial Sequence: Synthetic oligonucleotide
  source 1..19: mol_type = other RNA
gaagcactgccgggcagtc

SEQ ID NO: 5404 - RNA, 19 nt, synthetic construct
  misc_feature 1..19: note = Description of Artificial Sequence: Synthetic oligonucleotide
  source 1..19: mol_type = other RNA
agaagcactgccgggcagt

SEQ ID NO: 5405 - RNA, 19 nt, synthetic construct
  misc_feature 1..19: note = Description of Artificial Sequence: Synthetic oligonucleotide
  source 1..19: mol_type = other RNA
gagaagcactgccgggcag

SEQ ID NO: 5406 - RNA, 19 nt, synthetic construct
  misc_feature 1..19: note = Description of Artificial Sequence: Synthetic oligonucleotide
  source 1..19: mol_type = other RNA
ggagaagcactgccgggca

SEQ ID NO: 5407 - RNA, 19 nt, synthetic construct
  misc_feature 1..19: note = Description of Artificial Sequence: Synthetic oligonucleotide
  source 1..19: mol_type = other RNA
aggagaagcactgccgggc

SEQ ID NO: 5408 - RNA, 19 nt, synthetic construct
  misc_feature 1..19: note = Description of Artificial Sequence: Synthetic oligonucleotide
  source 1..19: mol_type = other RNA
gaggagaagcactgccggg

SEQ ID NO: 5409 - RNA, 19 nt, synthetic construct
  misc_feature 1..19: note = Description of Artificial Sequence: Synthetic oligonucleotide
  source 1..19: mol_type = other RNA
ggaggagaagcactgccgg

SEQ ID NO: 5410 - RNA, 19 nt, synthetic construct
  misc_feature 1..19: note = Description of Artificial Sequence: Synthetic oligonucleotide
  source 1..19: mol_type = other RNA
aggaggagaagcactgccg

SEQ ID NO: 5411 - RNA, 19 nt, synthetic construct
  misc_feature 1..19: note = Description of Artificial Sequence: Synthetic oligonucleotide
  source 1..19: mol_type = other RNA
caggaggagaagcactgcc

SEQ ID NO: 5412 - RNA, 19 nt, synthetic construct
  misc_feature 1..19: note = Description of Artificial Sequence: Synthetic oligonucleotide
  source 1..19: mol_type = other RNA
gcaggaggagaagcactgc

SEQ ID NO: 5413 - RNA, 19 nt, synthetic construct
  misc_feature 1..19: note = Description of Artificial Sequence: Synthetic oligonucleotide
  source 1..19: mol_type = other RNA
ggcaggaggagaagcactg

SEQ ID NO: 5414 - RNA, 19 nt, synthetic construct
  misc_feature 1..19: note = Description of Artificial Sequence: Synthetic oligonucleotide
  source 1..19: mol_type = other RNA
tggcaggaggagaagcact

SEQ ID NO: 5415 - RNA, 19 nt, synthetic construct
  misc_feature 1..19: note = Description of Artificial Sequence: Synthetic oligonucleotide
  source 1..19: mol_type = other RNA
atggcaggaggagaagcac

SEQ ID NO: 5416 - RNA, 19 nt, synthetic construct
  misc_feature 1..19: note = Description of Artificial Sequence: Synthetic oligonucleotide
  source 1..19: mol_type = other RNA
tatggcaggaggagaagca

SEQ ID NO: 5417 - RNA, 19 nt, synthetic construct
  misc_feature 1..19: note = Description of Artificial Sequence: Synthetic oligonucleotide
  source 1..19: mol_type = other RNA
atatggcaggaggagaagc

SEQ ID NO: 5418 - RNA, 19 nt, synthetic construct
  misc_feature 1..19: note = Description of Artificial Sequence: Synthetic oligonucleotide
  source 1..19: mol_type = other RNA
catatggcaggaggagaag

SEQ ID NO: 5419 - RNA, 19 nt, synthetic construct
  misc_feature 1..19: note = Description of Artificial Sequence: Synthetic oligonucleotide
  source 1..19: mol_type = other RNA
gcatatggcaggaggagaa

SEQ ID NO: 5420 - RNA, 19 nt, synthetic construct
  misc_feature 1..19: note = Description of Artificial Sequence: Synthetic oligonucleotide
  source 1..19: mol_type = other RNA
ggcatatggcaggaggaga

SEQ ID NO: 5421 - RNA, 19 nt, synthetic construct
  misc_feature 1..19: note = Description of Artificial Sequence: Synthetic oligonucleotide
  source 1..19: mol_type = other RNA
aggcatatggcaggaggag

SEQ ID NO: 5422 - RNA, 19 nt, synthetic construct
  misc_feature 1..19: note = Description of Artificial Sequence: Synthetic oligonucleotide
  source 1..19: mol_type = other RNA
gaggcatatggcaggagga

SEQ ID NO: 5423 - RNA, 19 nt, synthetic construct
  misc_feature 1..19: note = Description of Artificial Sequence: Synthetic oligonucleotide
  source 1..19: mol_type = other RNA
agaggcatatggcaggagg

SEQ ID NO: 5424 - RNA, 19 nt, synthetic construct
  misc_feature 1..19: note = Description of Artificial Sequence: Synthetic oligonucleotide
  source 1..19: mol_type = other RNA
gagaggcatatggcaggag

SEQ ID NO: 5425 - RNA, 19 nt, synthetic construct
  misc_feature 1..19: note = Description of Artificial Sequence: Synthetic oligonucleotide
  source 1..19: mol_type = other RNA
tgagaggcatatggcagga

SEQ ID NO: 5426 - RNA, 19 nt, synthetic construct
  misc_feature 1..19: note = Description of Artificial Sequence: Synthetic oligonucleotide
  source 1..19: mol_type = other RNA
gtgagaggcatatggcagg

SEQ ID NO: 5427 - RNA, 19 nt, synthetic construct
  misc_feature 1..19: note = Description of Artificial Sequence: Synthetic oligonucleotide
  source 1..19: mol_type = other RNA
cgtgagaggcatatggcag

SEQ ID NO: 5428 - RNA, 19 nt, synthetic construct
  misc_feature 1..19: note = Description of Artificial Sequence: Synthetic oligonucleotide
  source 1..19: mol_type = other RNA
ccgtgagaggcatatggca

SEQ ID NO: 5429 - RNA, 19 nt, synthetic construct
  misc_feature 1..19: note = Description of Artificial Sequence: Synthetic oligonucleotide
  source 1..19: mol_type = other RNA
cccgtgagaggcatatggc

SEQ ID NO: 5430 - RNA, 19 nt, synthetic construct
  misc_feature 1..19: note = Description of Artificial Sequence: Synthetic oligonucleotide
  source 1..19: mol_type = other RNA
gcccgtgagaggcatatgg

SEQ ID NO: 5431 - RNA, 19 nt, synthetic construct
  misc_feature 1..19: note = Description of Artificial Sequence: Synthetic oligonucleotide
  source 1..19: mol_type = other RNA
agcccgtgagaggcatatg

SEQ ID NO: 5432 - RNA, 19 nt, synthetic construct
  misc_feature 1..19: note = Description of Artificial Sequence: Synthetic oligonucleotide
  source 1..19: mol_type = other RNA
tagcccgtgagaggcatat

SEQ ID NO: 5433 - RNA, 19 nt, synthetic construct
  misc_feature 1..19: note = Description of Artificial Sequence: Synthetic oligonucleotide
  source 1..19: mol_type = other RNA
atagcccgtgagaggcata

SEQ ID NO: 5434 - RNA, 19 nt, synthetic construct
  misc_feature 1..19: note = Description of Artificial Sequence: Synthetic oligonucleotide
  source 1..19: mol_type = other RNA
catagcccgtgagaggcat

SEQ ID NO: 5435 - RNA, 19 nt, synthetic construct
  misc_feature 1..19: note = Description of Artificial Sequence: Synthetic oligonucleotide
  source 1..19: mol_type = other RNA
tcatagcccgtgagaggca

SEQ ID NO: 5436 - RNA, 19 nt, synthetic construct
  misc_feature 1..19: note = Description of Artificial Sequence: Synthetic oligonucleotide
  source 1..19: mol_type = other RNA
ctcatagcccgtgagaggc

SEQ ID NO: 5437 - RNA, 19 nt, synthetic construct
  misc_feature 1..19: note = Description of Artificial Sequence: Synthetic oligonucleotide
  source 1..19: mol_type = other RNA
cctcatagcccgtgagagg

SEQ ID NO: 5438 - RNA, 19 nt, synthetic construct
  misc_feature 1..19: note = Description of Artificial Sequence: Synthetic oligonucleotide
  source 1..19: mol_type = other RNA
acctcatagcccgtgagag

SEQ ID NO: 5439 - RNA, 19 nt, synthetic construct
  misc_feature 1..19: note = Description of Artificial Sequence: Synthetic oligonucleotide
  source 1..19: mol_type = other RNA
tacctcatagcccgtgaga

SEQ ID NO: 5440 - RNA, 19 nt, synthetic construct
  misc_feature 1..19: note = Description of Artificial Sequence: Synthetic oligonucleotide
  source 1..19: mol_type = other RNA
atacctcatagcccgtgag

SEQ ID NO: 5441 - RNA, 19 nt, synthetic construct
  misc_feature 1..19: note = Description of Artificial Sequence: Synthetic oligonucleotide
  source 1..19: mol_type = other RNA
catacctcatagcccgtga

SEQ ID NO: 5442 - RNA, 19 nt, synthetic construct
  misc_feature 1..19: note = Description of Artificial Sequence: Synthetic oligonucleotide
  source 1..19: mol_type = other RNA
ccatacctcatagcccgtg

SEQ ID NO: 5443 - RNA, 19 nt, synthetic construct
  misc_feature 1..19: note = Description of Artificial Sequence: Synthetic oligonucleotide
  source 1..19: mol_type = other RNA
accatacctcatagcccgt

SEQ ID NO: 5444 - RNA, 19 nt, synthetic construct
  misc_feature 1..19: note = Description of Artificial Sequence: Synthetic oligonucleotide
  source 1..19: mol_type = other RNA
aaccatacctcatagcccg

SEQ ID NO: 5445 - RNA, 19 nt, synthetic construct
  misc_feature 1..19: note = Description of Artificial Sequence: Synthetic oligonucleotide
  source 1..19: mol_type = other RNA
caaccatacctcatagccc

SEQ ID NO: 5446 - RNA, 19 nt, synthetic construct
  misc_feature 1..19: note = Description of Artificial Sequence: Synthetic oligonucleotide
  source 1..19: mol_type = other RNA
ccaaccatacctcatagcc

SEQ ID NO: 5447 - RNA, 19 nt, synthetic construct
  misc_feature 1..19: note = Description of Artificial Sequence: Synthetic oligonucleotide
  source 1..19: mol_type = other RNA
cccaaccatacctcatagc

SEQ ID NO: 5448 - RNA, 19 nt, synthetic construct
  misc_feature 1..19: note = Description of Artificial Sequence: Synthetic oligonucleotide
  source 1..19: mol_type = other RNA
gcccaaccatacctcatag

SEQ ID NO: 5449 - RNA, 19 nt, synthetic construct
  misc_feature 1..19: note = Description of Artificial Sequence: Synthetic oligonucleotide
  source 1..19: mol_type = other RNA
tgcccaaccatacctcata

SEQ ID NO: 5450 - RNA, 19 nt, synthetic construct
  misc_feature 1..19: note = Description of Artificial Sequence: Synthetic oligonucleotide
  source 1..19: mol_type = other RNA
gtgcccaaccatacctcat

SEQ ID NO: 5451 - RNA, 19 nt, synthetic construct
  misc_feature 1..19: note = Description of Artificial Sequence: Synthetic oligonucleotide
  source 1..19: mol_type = other RNA
ggtgcccaaccatacctca

SEQ ID NO: 5452 - RNA, 19 nt, synthetic construct
  misc_feature 1..19: note = Description of Artificial Sequence: Synthetic oligonucleotide
  source 1..19: mol_type = other RNA
gggtgcccaaccatacctc

SEQ ID NO: 5453 - RNA, 19 nt, synthetic construct
  misc_feature 1..19: note = Description of Artificial Sequence: Synthetic oligonucleotide
  source 1..19: mol_type = other RNA
agggtgcccaaccatacct

SEQ ID NO: 5454 - RNA, 19 nt, synthetic construct
  misc_feature 1..19: note = Description of Artificial Sequence: Synthetic oligonucleotide
  source 1..19: mol_type = other RNA
cagggtgcccaaccatacc

SEQ ID NO: 5455 - RNA, 19 nt, synthetic construct
  misc_feature 1..19: note = Description of Artificial Sequence: Synthetic oligonucleotide
  source 1..19: mol_type = other RNA
acagggtgcccaaccatac

SEQ ID NO: 5456 - RNA, 19 nt, synthetic construct
  misc_feature 1..19: note = Description of Artificial Sequence: Synthetic oligonucleotide
  source 1..19: mol_type = other RNA
aacagggtgcccaaccata

SEQ ID NO: 5457 - RNA, 19 nt, synthetic construct
  misc_feature 1..19: note = Description of Artificial Sequence: Synthetic oligonucleotide
  source 1..19: mol_type = other RNA
gaacagggtgcccaaccat

SEQ ID NO: 5458 - RNA, 19 nt, synthetic construct
  misc_feature 1..19: note = Description of Artificial Sequence: Synthetic oligonucleotide
  source 1..19: mol_type = other RNA
ggaacagggtgcccaacca

SEQ ID NO: 5459 - RNA, 19 nt, synthetic construct
  misc_feature 1..19: note = Description of Artificial Sequence: Synthetic oligonucleotide
  source 1..19: mol_type = other RNA
tggaacagggtgcccaacc

SEQ ID NO: 5460 - RNA, 19 nt, synthetic construct
  misc_feature 1..19: note = Description of Artificial Sequence: Synthetic oligonucleotide
  source 1..19: mol_type = other RNA
ctggaacagggtgcccaac

SEQ ID NO: 5461 - RNA, 19 nt, synthetic construct
  misc_feature 1..19: note = Description of Artificial Sequence: Synthetic oligonucleotide
  source 1..19: mol_type = other RNA
tctggaacagggtgcccaa

SEQ ID NO: 5462 - RNA, 19 nt, synthetic construct
  misc_feature 1..19: note = Description of Artificial Sequence: Synthetic oligonucleotide
  source 1..19: mol_type = other RNA
ttctggaacagggtgccca

SEQ ID NO: 5463 - RNA, 19 nt, synthetic construct
  misc_feature 1..19: note = Description of Artificial Sequence: Synthetic oligonucleotide
  source 1..19: mol_type = other RNA
gttctggaacagggtgccc

SEQ ID NO: 5464 - RNA, 19 nt, synthetic construct
  misc_feature 1..19: note = Description of Artificial Sequence: Synthetic oligonucleotide
  source 1..19: mol_type = other RNA
ggttctggaacagggtgcc

SEQ ID NO: 5465 - RNA, 19 nt, synthetic construct
  misc_feature 1..19: note = Description of Artificial Sequence: Synthetic oligonucleotide
  source 1..19: mol_type = other RNA
gggttctggaacagggtgc

SEQ ID NO: 5466 - RNA, 19 nt, synthetic construct
  misc_feature 1..19: note = Description of Artificial Sequence: Synthetic oligonucleotide
  source 1..19: mol_type = other RNA
tgggttctggaacagggtg

SEQ ID NO: 5467 - RNA, 19 nt, synthetic construct
  misc_feature 1..19: note = Description of Artificial Sequence: Synthetic oligonucleotide
  source 1..19: mol_type = other RNA
gtgggttctggaacagggt

SEQ ID NO: 5468 - RNA, 19 nt, synthetic construct
  misc_feature 1..19: note = Description of Artificial Sequence: Synthetic oligonucleotide
  source 1..19: mol_type = other RNA
tgtgggttctggaacaggg

SEQ ID NO: 5469 - RNA, 19 nt, synthetic construct
  misc_feature 1..19: note = Description of Artificial Sequence: Synthetic oligonucleotide
  source 1..19: mol_type = other RNA
ctgtgggttctggaacagg

SEQ ID NO: 5470 - RNA, 19 nt, synthetic construct
  misc_feature 1..19: note = Description of Artificial Sequence: Synthetic oligonucleotide
  source 1..19: mol_type = other RNA
gctgtgggttctggaacag

SEQ ID NO: 5471 - RNA, 19 nt, synthetic construct
  misc_feature 1..19: note = Description of Artificial Sequence: Synthetic oligonucleotide
  source 1..19: mol_type = other RNA
tgctgtgggttctggaaca

SEQ ID NO: 5472 - RNA, 19 nt, synthetic construct
  misc_feature 1..19: note = Description of Artificial Sequence: Synthetic oligonucleotide
  source 1..19: mol_type = other RNA
atgctgtgggttctggaac

SEQ ID NO: 5473 - RNA, 19 nt, synthetic construct
  misc_feature 1..19: note = Description of Artificial Sequence: Synthetic oligonucleotide
  source 1..19: mol_type = other RNA
catgctgtgggttctggaa

SEQ ID NO: 5474 - RNA, 19 nt, synthetic construct
  misc_feature 1..19: note = Description of Artificial Sequence: Synthetic oligonucleotide
  source 1..19: mol_type = other RNA
ccatgctgtgggttctgga

SEQ ID NO: 5475 - RNA, 19 nt, synthetic construct
  misc_feature 1..19: note = Description of Artificial Sequence: Synthetic oligonucleotide
  source 1..19: mol_type = other RNA
tccatgctgtgggttctgg

SEQ ID NO: 5476 - RNA, 19 nt, synthetic construct
  misc_feature 1..19: note = Description of Artificial Sequence: Synthetic oligonucleotide
  source 1..19: mol_type = other RNA
ctccatgctgtgggttctg

SEQ ID NO: 5477 - RNA, 19 nt, synthetic construct
  misc_feature 1..19: note = Description of Artificial Sequence: Synthetic oligonucleotide
  source 1..19: mol_type = other RNA
tctccatgctgtgggttct

SEQ ID NO: 5478 - RNA, 19 nt, synthetic construct
  misc_feature 1..19: note = Description of Artificial Sequence: Synthetic oligonucleotide
  source 1..19: mol_type = other RNA
ctctccatgctgtgggttc

SEQ ID NO: 5479 - RNA, 19 nt, synthetic construct
  misc_feature 1..19: note = Description of Artificial Sequence: Synthetic oligonucleotide
  source 1..19: mol_type = other RNA
gctctccatgctgtgggtt

SEQ ID NO: 5480 - RNA, 19 nt, synthetic construct
  misc_feature 1..19: note = Description of Artificial Sequence: Synthetic oligonucleotide
  source 1..19: mol_type = other RNA
ggctctccatgctgtgggt

SEQ ID NO: 5481 - RNA, 19 nt, synthetic construct
  misc_feature 1..19: note = Description of Artificial Sequence: Synthetic oligonucleotide
  source 1..19: mol_type = other RNA
tggctctccatgctgtggg

SEQ ID NO: 5482 - RNA, 19 nt, synthetic construct
  misc_feature 1..19: note = Description of Artificial Sequence: Synthetic oligonucleotide
  source 1..19: mol_type = other RNA
ttggctctccatgctgtgg

SEQ ID NO: 5483 - RNA, 19 nt, synthetic construct
  misc_feature 1..19: note = Description of Artificial Sequence: Synthetic oligonucleotide
  source 1..19: mol_type = other RNA
cttggctctccatgctgtg

SEQ ID NO: 5484 - RNA, 19 nt, synthetic construct
  misc_feature 1..19: note = Description of Artificial Sequence: Synthetic oligonucleotide
  source 1..19: mol_type = other RNA
gcttggctctccatgctgt

SEQ ID NO: 5485 - RNA, 19 nt, synthetic construct
  misc_feature 1..19: note = Description of Artificial Sequence: Synthetic oligonucleotide
  source 1..19: mol_type = other RNA
ggcttggctctccatgctg

SEQ ID NO: 5486 - RNA, 19 nt, synthetic construct
  misc_feature 1..19: note = Description of Artificial Sequence: Synthetic oligonucleotide
  source 1..19: mol_type = other RNA
aggcttggctctccatgct

SEQ ID NO: 5487 - RNA, 19 nt, synthetic construct
  misc_feature 1..19: note = Description of Artificial Sequence: Synthetic oligonucleotide
  source 1..19: mol_type = other RNA
taggcttggctctccatgc

SEQ ID NO: 5488 - RNA, 19 nt, synthetic construct
  misc_feature 1..19: note = Description of Artificial Sequence: Synthetic oligonucleotide
  source 1..19: mol_type = other RNA
gtaggcttggctctccatg

SEQ ID NO: 5489 - RNA, 19 nt, synthetic construct
  misc_feature 1..19: note = Description of Artificial Sequence: Synthetic oligonucleotide
  source 1..19: mol_type = other RNA
tgtaggcttggctctccat

SEQ ID NO: 5490 - RNA, 19 nt, synthetic construct
  misc_feature 1..19: note = Description of Artificial Sequence: Synthetic oligonucleotide
  source 1..19: mol_type = other RNA
ctgtaggcttggctctcca

SEQ ID NO: 5491 - RNA, 19 nt, synthetic construct
  misc_feature 1..19: note = Description of Artificial Sequence: Synthetic oligonucleotide
  source 1..19: mol_type = other RNA
gctgtaggcttggctctcc

SEQ ID NO: 5492 - RNA, 19 nt, synthetic construct
  misc_feature 1..19: note = Description of Artificial Sequence: Synthetic oligonucleotide
  source 1..19: mol_type = other RNA
cgctgtaggcttggctctc

SEQ ID NO: 5493 - RNA, 19 nt, synthetic construct
  misc_feature 1..19: note = Description of Artificial Sequence: Synthetic oligonucleotide
  source 1..19: mol_type = other RNA
ccgctgtaggcttggctct

SEQ ID NO: 5494 - RNA, 19 nt, synthetic construct
  misc_feature 1..19: note = Description of Artificial Sequence: Synthetic oligonucleotide
  source 1..19: mol_type = other RNA
cccgctgtaggcttggctc

SEQ ID NO: 5495 - RNA, 19 nt, synthetic construct
  misc_feature 1..19: note = Description of Artificial Sequence: Synthetic oligonucleotide
  source 1..19: mol_type = other RNA
acccgctgtaggcttggct

SEQ ID NO: 5496 - RNA, 19 nt, synthetic construct
  misc_feature 1..19: note = Description of Artificial Sequence: Synthetic oligonucleotide
  source 1..19: mol_type = other RNA
gacccgctgtaggcttggc

SEQ ID NO: 5497 - RNA, 19 nt, synthetic construct
  misc_feature 1..19: note = Description of Artificial Sequence: Synthetic oligonucleotide
  source 1..19: mol_type = other RNA
ggacccgctgtaggcttgg

SEQ ID NO: 5498 - RNA, 19 nt, synthetic construct
  misc_feature 1..19: note = Description of Artificial Sequence: Synthetic oligonucleotide
  source 1..19: mol_type = other RNA
gggacccgctgtaggcttg

SEQ ID NO: 5499 - RNA, 19 nt, synthetic construct
  misc_feature 1..19: note = Description of Artificial Sequence: Synthetic oligonucleotide
  source 1..19: mol_type = other RNA
tgggacccgctgtaggctt

SEQ ID NO: 5500 - RNA, 19 nt, synthetic construct
  misc_feature 1..19: note = Description of Artificial Sequence: Synthetic oligonucleotide
  source 1..19: mol_type = other RNA
ctgggacccgctgtaggct

SEQ ID NO: 5501 - RNA, 19 nt, synthetic construct
  misc_feature 1..19: note = Description of Artificial Sequence: Synthetic oligonucleotide
  source 1..19: mol_type = other RNA
actgggacccgctgtaggc

SEQ ID NO: 5502 - RNA, 19 nt, synthetic construct
  misc_feature 1..19: note = Description of Artificial Sequence: Synthetic oligonucleotide
  source 1..19: mol_type = other RNA
tactgggacccgctgtagg

SEQ ID NO: 5503 - RNA, 19 nt, synthetic construct
  misc_feature 1..19: note = Description of Artificial Sequence: Synthetic oligonucleotide
  source 1..19: mol_type = other RNA
ctactgggacccgctgtag

SEQ ID NO: 5504 - RNA, 19 nt, synthetic construct
  misc_feature 1..19: note = Description of Artificial Sequence: Synthetic oligonucleotide
  source 1..19: mol_type = other RNA
gctactgggacccgctgta

SEQ ID NO: 5505 - RNA, 19 nt, synthetic construct
  misc_feature 1..19: note = Description of Artificial Sequence: Synthetic oligonucleotide
  source 1..19: mol_type = other RNA
ggctactgggacccgctgt

SEQ ID NO: 5506 - RNA, 19 nt, synthetic construct
  misc_feature 1..19: note = Description of Artificial Sequence: Synthetic oligonucleotide
  source 1..19: mol_type = other RNA
tggctactgggacccgctg

SEQ ID NO: 5507 - RNA, 19 nt, synthetic construct
  misc_feature 1..19: note = Description of Artificial Sequence: Synthetic oligonucleotide
  source 1..19: mol_type = other RNA
ttggctactgggacccgct

SEQ ID NO: 5508 - RNA, 19 nt, synthetic construct
  misc_feature 1..19: note = Description of Artificial Sequence: Synthetic oligonucleotide
  source 1..19: mol_type = other RNA
cttggctactgggacccgc

SEQ ID NO: 5509 - RNA, 19 nt, synthetic construct
  misc_feature 1..19: note = Description of Artificial Sequence: Synthetic oligonucleotide
  source 1..19: mol_type = other RNA
tcttggctactgggacccg

SEQ ID NO: 5510 - RNA, 19 nt, synthetic construct
  misc_feature 1..19: note = Description of Artificial Sequence: Synthetic oligonucleotide
  source 1..19: mol_type = other RNA
atcttggctactgggaccc

SEQ ID NO: 5511 - RNA, 19 nt, synthetic construct
  misc_feature 1..19: note = Description of Artificial Sequence: Synthetic oligonucleotide
  source 1..19: mol_type = other RNA
catcttggctactgggacc

SEQ ID NO: 5512 - RNA, 19 nt, synthetic construct
  misc_feature 1..19: note = Description of Artificial Sequence: Synthetic oligonucleotide
  source 1..19: mol_type = other RNA
ccatcttggctactgggac

SEQ ID NO: 5513 - RNA, 19 nt, synthetic construct
  misc_feature 1..19: note = Description of Artificial Sequence: Synthetic oligonucleotide
  source 1..19: mol_type = other RNA
accatcttggctactggga

SEQ ID NO: 5514 - RNA, 19 nt, synthetic construct
  misc_feature 1..19: note = Description of Artificial Sequence: Synthetic oligonucleotide
  source 1..19: mol_type = other RNA
caccatcttggctactggg

SEQ ID NO: 5515 - RNA, 19 nt, synthetic construct
  misc_feature 1..19: note = Description of Artificial Sequence: Synthetic oligonucleotide
  source 1..19: mol_type = other RNA
acaccatcttggctactgg

SEQ ID NO: 5516 - RNA, 19 nt, synthetic construct
  misc_feature 1..19: note = Description of Artificial Sequence: Synthetic oligonucleotide
  source 1..19: mol_type = other RNA
cacaccatcttggctactg

SEQ ID NO: 5517 - RNA, 19 nt, synthetic construct
  misc_feature 1..19: note = Description of Artificial Sequence: Synthetic oligonucleotide
  source 1..19: mol_type = other RNA
acacaccatcttggctact

SEQ ID NO: 5518 - RNA, 19 nt, synthetic construct
  misc_feature 1..19: note = Description of Artificial Sequence: Synthetic oligonucleotide
  source 1..19: mol_type = other RNA
cacacaccatcttggctac

SEQ ID NO: 5519 - RNA, 19 nt, synthetic construct
  misc_feature 1..19: note = Description of Artificial Sequence: Synthetic oligonucleotide
  source 1..19: mol_type = other RNA
ccacacaccatcttggcta

SEQ ID NO: 5520 - RNA, 19 nt, synthetic construct
  misc_feature 1..19: note = Description of Artificial Sequence: Synthetic oligonucleotide
  source 1..19: mol_type = other RNA
cccacacaccatcttggct

SEQ ID NO: 5521 - RNA, 19 nt, synthetic construct
  misc_feature 1..19: note = Description of Artificial Sequence: Synthetic oligonucleotide
  source 1..19: mol_type = other RNA
gcccacacaccatcttggc

SEQ ID NO: 5522 - RNA, 19 nt, synthetic construct
  misc_feature 1..19: note = Description of Artificial Sequence: Synthetic oligonucleotide
  source 1..19: mol_type = other RNA
ggcccacacaccatcttgg

SEQ ID NO: 5523 - RNA, 19 nt, synthetic construct
  misc_feature 1..19: note = Description of Artificial Sequence: Synthetic oligonucleotide
  source 1..19: mol_type = other RNA
gggcccacacaccatcttg

SEQ ID NO: 5524 - RNA, 19 nt, synthetic construct
  misc_feature 1..19: note = Description of Artificial Sequence: Synthetic oligonucleotide
  source 1..19: mol_type = other RNA
agggcccacacaccatctt

SEQ ID NO: 5525 - RNA, 19 nt, synthetic construct
  misc_feature 1..19: note = Description of Artificial Sequence: Synthetic oligonucleotide
  source 1..19: mol_type = other RNA
gagggcccacacaccatct

SEQ ID NO: 5526 - RNA, 19 nt, synthetic construct
  misc_feature 1..19: note = Description of Artificial Sequence: Synthetic oligonucleotide
  source 1..19: mol_type = other RNA
tgagggcccacacaccatc

SEQ ID NO: 5527 - RNA, 19 nt, synthetic construct
  misc_feature 1..19: note = Description of Artificial Sequence: Synthetic oligonucleotide
  source 1..19: mol_type = other RNA
ctgagggcccacacaccat

SEQ ID NO: 5528 - RNA, 19 nt, synthetic construct
  misc_feature 1..19: note = Description of Artificial Sequence: Synthetic oligonucleotide
  source 1..19: mol_type = other RNA
cctgagggcccacacacca

SEQ ID NO: 5529 - RNA, 19 nt, synthetic construct
  misc_feature 1..19: note = Description of Artificial Sequence: Synthetic oligonucleotide
  source 1..19: mol_type = other RNA
gcctgagggcccacacacc

SEQ ID NO: 5530 - RNA, 19 nt, synthetic construct
  misc_feature 1..19: note = Description of Artificial Sequence: Synthetic oligonucleotide
  source 1..19: mol_type = other RNA
agcctgagggcccacacac

SEQ ID NO: 5531 - RNA, 19 nt, synthetic construct
  misc_feature 1..19: note = Description of Artificial Sequence: Synthetic oligonucleotide
  source 1..19: mol_type = other RNA
gagcctgagggcccacaca

SEQ ID NO: 5532 - RNA, 19 nt, synthetic construct
  misc_feature 1..19: note = Description of Artificial Sequence: Synthetic oligonucleotide
  source 1..19: mol_type = other RNA
ggagcctgagggcccacac

SEQ ID NO: 5533 - RNA, 19 nt, synthetic construct
  misc_feature 1..19: note = Description of Artificial Sequence: Synthetic oligonucleotide
  source 1..19: mol_type = other RNA
gggagcctgagggcccaca

SEQ ID NO: 5534 - RNA, 19 nt, synthetic construct
  misc_feature 1..19: note = Description of Artificial Sequence: Synthetic oligonucleotide
  source 1..19: mol_type = other RNA
tgggagcctgagggcccac

SEQ ID NO: 5535 - RNA, 19 nt, synthetic construct
  misc_feature 1..19: note = Description of Artificial Sequence: Synthetic oligonucleotide
  source 1..19: mol_type = other RNA
ctgggagcctgagggccca

SEQ ID NO: 5536 - RNA, 19 nt, synthetic construct
  misc_feature 1..19: note = Description of Artificial Sequence: Synthetic oligonucleotide
  source 1..19: mol_type = other RNA
gctgggagcctgagggccc

SEQ ID NO: 5537 - RNA, 19 nt, synthetic construct
  misc_feature 1..19: note = Description of Artificial Sequence: Synthetic oligonucleotide
  source 1..19: mol_type = other RNA
agctgggagcctgagggcc

SEQ ID NO: 5538 - RNA, 19 nt, synthetic construct
  misc_feature 1..19: note = Description of Artificial Sequence: Synthetic oligonucleotide
  source 1..19: mol_type = other RNA
aagctgggagcctgagggc

SEQ ID NO: 5539 - RNA, 19 nt, synthetic construct
  misc_feature 1..19: note = Description of Artificial Sequence: Synthetic oligonucleotide
  source 1..19: mol_type = other RNA
caagctgggagcctgaggg

SEQ ID NO: 5540 - RNA, 19 nt, synthetic construct
  misc_feature 1..19: note = Description of Artificial Sequence: Synthetic oligonucleotide
  source 1..19: mol_type = other RNA
acaagctgggagcctgagg

SEQ ID NO: 5541 - RNA, 19 nt, synthetic construct
  misc_feature 1..19: note = Description of Artificial Sequence: Synthetic oligonucleotide
  source 1..19: mol_type = other RNA
gacaagctgggagcctgag

SEQ ID NO: 5542 - RNA, 19 nt, synthetic construct
  misc_feature 1..19: note = Description of Artificial Sequence: Synthetic oligonucleotide
  source 1..19: mol_type = other RNA
ggacaagctgggagcctga

SEQ ID NO: 5543 - RNA, 19 nt, synthetic construct
  misc_feature 1..19: note = Description of Artificial Sequence: Synthetic oligonucleotide
  source 1..19: mol_type = other RNA
aggacaagctgggagcctg

SEQ ID NO: 5544 - RNA, 19 nt, synthetic construct
  misc_feature 1..19: note = Description of Artificial Sequence: Synthetic oligonucleotide
  source 1..19: mol_type = other RNA
caggacaagctgggagcct

SEQ ID NO: 5545 - RNA, 19 nt, synthetic construct
  misc_feature 1..19: note = Description of Artificial Sequence: Synthetic oligonucleotide
  source 1..19: mol_type = other RNA
gcaggacaagctgggagcc

SEQ ID NO: 5546 - RNA, 19 nt, synthetic construct
  misc_feature 1..19: note = Description of Artificial Sequence: Synthetic oligonucleotide
  source 1..19: mol_type = other RNA
agcaggacaagctgggagc

SEQ ID NO: 5547 - RNA, 19 nt, synthetic construct
  misc_feature 1..19: note = Description of Artificial Sequence: Synthetic oligonucleotide
  source 1..19: mol_type = other RNA
gagcaggacaagctgggag

SEQ ID NO: 5548 - RNA, 19 nt, synthetic construct
  misc_feature 1..19: note = Description of Artificial Sequence: Synthetic oligonucleotide
  source 1..19: mol_type = other RNA
tgagcaggacaagctggga

SEQ ID NO: 5549 - RNA, 19 nt, synthetic construct
  misc_feature 1..19: note = Description of Artificial Sequence: Synthetic oligonucleotide
  source 1..19: mol_type = other RNA
ttgagcaggacaagctggg

SEQ ID NO: 5550 - RNA, 19 nt, synthetic construct
  misc_feature 1..19: note = Description of Artificial Sequence: Synthetic oligonucleotide
  source 1..19: mol_type = other RNA
cttgagcaggacaagctgg

SEQ ID NO: 5551 - RNA, 19 nt, synthetic construct
  misc_feature 1..19: note = Description of Artificial Sequence: Synthetic oligonucleotide
  source 1..19: mol_type = other RNA
gcttgagcaggacaagctg

SEQ ID NO: 5552 - RNA, 19 nt, synthetic construct
  misc_feature 1..19: note = Description of Artificial Sequence: Synthetic oligonucleotide
  source 1..19: mol_type = other RNA
agcttgagcaggacaagct

SEQ ID NO: 5553 - RNA, 19 nt, synthetic construct
  misc_feature 1..19: note = Description of Artificial Sequence: Synthetic oligonucleotide
  source 1..19: mol_type = other RNA
cagcttgagcaggacaagc

SEQ ID NO: 5554 - RNA, 19 nt, synthetic construct
  misc_feature 1..19: note = Description of Artificial Sequence: Synthetic oligonucleotide
  source 1..19: mol_type = other RNA
ccagcttgagcaggacaag

SEQ ID NO: 5555 - RNA, 19 nt, synthetic construct
  misc_feature 1..19: note = Description of Artificial Sequence: Synthetic oligonucleotide
  source 1..19: mol_type = other RNA
tccagcttgagcaggacaa

SEQ ID NO: 5556 - RNA, 19 nt, synthetic construct
  misc_feature 1..19: note = Description of Artificial Sequence: Synthetic oligonucleotide
  source 1..19: mol_type = other RNA
ctccagcttgagcaggaca

SEQ ID NO: 5557 - RNA, 19 nt, synthetic construct
  misc_feature 1..19: note = Description of Artificial Sequence: Synthetic oligonucleotide
  source 1..19: mol_type = other RNA
tctccagcttgagcaggac

SEQ ID NO: 5558 - RNA, 19 nt, synthetic construct
  misc_feature 1..19: note = Description of Artificial Sequence: Synthetic oligonucleotide
  source 1..19: mol_type = other RNA
ctctccagcttgagcagga

SEQ ID NO: 5559 - RNA, 19 nt, synthetic construct
  misc_feature 1..19: note = Description of Artificial Sequence: Synthetic oligonucleotide
  source 1..19: mol_type = other RNA
tctctccagcttgagcagg

SEQ ID NO: 5560 - RNA, 19 nt, synthetic construct
  misc_feature 1..19: note = Description of Artificial Sequence: Synthetic oligonucleotide
  source 1..19: mol_type = other RNA
atctctccagcttgagcag

SEQ ID NO: 5561 - RNA, 19 nt, synthetic construct
  misc_feature 1..19: note = Description of Artificial Sequence: Synthetic oligonucleotide
  source 1..19: mol_type = other RNA
gatctctccagcttgagca

SEQ ID NO: 5562 - RNA, 19 nt, synthetic construct
  misc_feature 1..19: note = Description of Artificial Sequence: Synthetic oligonucleotide
  source 1..19: mol_type = other RNA
agatctctccagcttgagc

SEQ ID NO: 5563 - RNA, 19 nt, synthetic construct
  misc_feature 1..19: note = Description of Artificial Sequence: Synthetic oligonucleotide
  source 1..19: mol_type = other RNA
cagatctctccagcttgag

SEQ ID NO: 5564 - RNA, 19 nt, synthetic construct
  misc_feature 1..19: note = Description of Artificial Sequence: Synthetic oligonucleotide
  source 1..19: mol_type = other RNA
acagatctctccagcttga

SEQ ID NO: 5565 - RNA, 19 nt, synthetic construct
  misc_feature 1..19: note = Description of Artificial Sequence: Synthetic oligonucleotide
  source 1..19: mol_type = other RNA
cacagatctctccagcttg

SEQ ID NO: 5566 - RNA, 19 nt, synthetic construct
  misc_feature 1..19: note = Description of Artificial Sequence: Synthetic oligonucleotide
  source 1..19: mol_type = other RNA
tcacagatctctccagctt

SEQ ID NO: 5567 - RNA, 19 nt, synthetic construct
  misc_feature 1..19: note = Description of Artificial Sequence: Synthetic oligonucleotide
  source 1..19: mol_type = other RNA
gtcacagatctctccagct

SEQ ID NO: 5568 - RNA, 19 nt, synthetic construct
  misc_feature 1..19: note = Description of Artificial Sequence: Synthetic oligonucleotide
  source 1..19: mol_type = other RNA
ggtcacagatctctccagc

SEQ ID NO: 5569 - RNA, 19 nt, synthetic construct
  misc_feature 1..19: note = Description of Artificial Sequence: Synthetic oligonucleotide
  source 1..19: mol_type = other RNA
gggtcacagatctctccag

SEQ ID NO: 5570 - RNA, 19 nt, synthetic construct
  misc_feature 1..19: note = Description of Artificial Sequence: Synthetic oligonucleotide
  source 1..19: mol_type = other RNA
agggtcacagatctctcca

SEQ ID NO: 5571 - RNA, 19 nt, synthetic construct
  misc_feature 1..19: note = Description of Artificial Sequence: Synthetic oligonucleotide
  source 1..19: mol_type = other RNA
cagggtcacagatctctcc

SEQ ID NO: 5572 - RNA, 19 nt, synthetic construct
  misc_feature 1..19: note = Description of Artificial Sequence: Synthetic oligonucleotide
  source 1..19: mol_type = other RNA
tcagggtcacagatctctc

SEQ ID NO: 5573 - RNA, 19 nt, synthetic construct
  misc_feature 1..19: note = Description of Artificial Sequence: Synthetic oligonucleotide
  source 1..19: mol_type = other RNA
ttcagggtcacagatctct

SEQ ID NO: 5574 - RNA, 19 nt, synthetic construct
  misc_feature 1..19: note = Description of Artificial Sequence: Synthetic oligonucleotide
  source 1..19: mol_type = other RNA
gttcagggtcacagatctc

SEQ ID NO: 5575 - RNA, 19 nt, synthetic construct
  misc_feature 1..19: note = Description of Artificial Sequence: Synthetic oligonucleotide
  source 1..19: mol_type = other RNA
ggttcagggtcacagatct

SEQ ID NO: 5576 - RNA, 19 nt, synthetic construct
  misc_feature 1..19: note = Description of Artificial Sequence: Synthetic oligonucleotide
  source 1..19: mol_type = other RNA
tggttcagggtcacagatc

SEQ ID NO: 5577 - RNA, 19 nt, synthetic construct
  misc_feature 1..19: note = Description of Artificial Sequence: Synthetic oligonucleotide
  source 1..19: mol_type = other RNA
ctggttcagggtcacagat

SEQ ID NO: 5578 - RNA, 19 nt, synthetic construct
  misc_feature 1..19: note = Description of Artificial Sequence: Synthetic oligonucleotide
  source 1..19: mol_type = other RNA
gctggttcagggtcacaga

SEQ ID NO: 5579 - RNA, 19 nt, synthetic construct
  misc_feature 1..19: note = Description of Artificial Sequence: Synthetic oligonucleotide
  source 1..19: mol_type = other RNA
cgctggttcagggtcacag

SEQ ID NO: 5580 - RNA, 19 nt, synthetic construct
  misc_feature 1..19: note = Description of Artificial Sequence: Synthetic oligonucleotide
  source 1..19: mol_type = other RNA
acgctggttcagggtcaca

SEQ ID NO: 5581 - RNA, 19 nt, synthetic construct
  misc_feature 1..19: note = Description of Artificial Sequence: Synthetic oligonucleotide
  source 1..19: mol_type = other RNA
cacgctggttcagggtcac

SEQ ID NO: 5582 - RNA, 19 nt, synthetic construct
  misc_feature 1..19: note = Description of Artificial Sequence: Synthetic oligonucleotide
  source 1..19: mol_type = other RNA
acacgctggttcagggtca

SEQ ID NO: 5583 - RNA, 19 nt, synthetic construct
  misc_feature 1..19: note = Description of Artificial Sequence: Synthetic oligonucleotide
  source 1..19: mol_type = other RNA
cacacgctggttcagggtc

SEQ ID NO: 5584 - RNA, 19 nt, synthetic construct
  misc_feature 1..19: note = Description of Artificial Sequence: Synthetic oligonucleotide
  source 1..19: mol_type = other RNA
ccacacgctggttcagggt

SEQ ID NO: 5585 - RNA, 19 nt, synthetic construct
  misc_feature 1..19: note = Description of Artificial Sequence: Synthetic oligonucleotide
  source 1..19: mol_type = other RNA
gccacacgctggttcaggg

SEQ ID NO: 5586 - RNA, 19 nt, synthetic construct
  misc_feature 1..19: note = Description of Artificial Sequence: Synthetic oligonucleotide
  source 1..19: mol_type = other RNA
ggccacacgctggttcagg

SEQ ID NO: 5587 - RNA, 19 nt, synthetic construct
  misc_feature 1..19: note = Description of Artificial Sequence: Synthetic oligonucleotide
  source 1..19: mol_type = other RNA
gggccacacgctggttcag

SEQ ID NO: 5588 - RNA, 19 nt, synthetic construct
  misc_feature 1..19: note = Description of Artificial Sequence: Synthetic oligonucleotide
  source 1..19: mol_type = other RNA
agggccacacgctggttca

SEQ ID NO: 5589 - RNA, 19 nt, synthetic construct
  misc_feature 1..19: note = Description of Artificial Sequence: Synthetic oligonucleotide
  source 1..19: mol_type = other RNA
cagggccacacgctggttc

SEQ ID NO: 5590 - RNA, 19 nt, synthetic construct
  misc_feature 1..19: note = Description of Artificial Sequence: Synthetic oligonucleotide
  source 1..19: mol_type = other RNA
tcagggccacacgctggtt

SEQ ID NO: 5591 - RNA, 19 nt, synthetic construct
  misc_feature 1..19: note = Description of Artificial Sequence: Synthetic oligonucleotide
  source 1..19: mol_type = other RNA
atcagggccacacgctggt

SEQ ID NO: 5592 - RNA, 19 nt, synthetic construct
  misc_feature 1..19: note = Description of Artificial Sequence: Synthetic oligonucleotide
  source 1..19: mol_type = other RNA
gatcagggccacacgctgg

SEQ ID NO: 5593 - RNA, 19 nt, synthetic construct
  misc_feature 1..19: note = Description of Artificial Sequence: Synthetic oligonucleotide
  source 1..19: mol_type = other RNA
agatcagggccacacgctg

SEQ ID NO: 5594 - RNA, 19 nt, synthetic construct
  misc_feature 1..19: note = Description of Artificial Sequence: Synthetic oligonucleotide
  source 1..19: mol_type = other RNA
cagatcagggccacacgct

SEQ ID NO: 5595 - RNA, 19 nt, synthetic construct
  misc_feature 1..19: note = Description of Artificial Sequence: Synthetic oligonucleotide
  source 1..19: mol_type = other RNA
gcagatcagggccacacgc

SEQ ID NO: 5596 - RNA, 19 nt, synthetic construct
  misc_feature 1..19: note = Description of Artificial Sequence: Synthetic oligonucleotide
  source 1..19: mol_type = other RNA
ggcagatcagggccacacg

SEQ ID NO: 5597 - RNA, 19 nt, synthetic construct
  misc_feature 1..19: note = Description of Artificial Sequence: Synthetic oligonucleotide
  source 1..19: mol_type = other RNA
aggcagatcagggccacac

SEQ ID NO: 5598 - RNA, 19 nt, synthetic construct
  misc_feature 1..19: note = Description of Artificial Sequence: Synthetic oligonucleotide
  source 1..19: mol_type = other RNA
caggcagatcagggccaca

SEQ ID NO: 5599 - RNA, 19 nt, synthetic construct
  misc_feature 1..19: note = Description of Artificial Sequence: Synthetic oligonucleotide
  source 1..19: mol_type = other RNA
gcaggcagatcagggccac

SEQ ID NO: 5600 - RNA, 19 nt, synthetic construct
  misc_feature 1..19: note = Description of Artificial Sequence: Synthetic oligonucleotide
  source 1..19: mol_type = other RNA
ggcaggcagatcagggcca

SEQ ID NO: 5601 - RNA, 19 nt, synthetic construct
  misc_feature 1..19: note = Description of Artificial Sequence: Synthetic oligonucleotide
  source 1..19: mol_type = other RNA
gggcaggcagatcagggcc

SEQ ID NO: 5602 - RNA, 19 nt, synthetic construct
  misc_feature 1..19: note = Description of Artificial Sequence: Synthetic oligonucleotide
  source 1..19: mol_type = other RNA
ggggcaggcagatcagggc

SEQ ID NO: 5603 - RNA, 19 nt, synthetic construct
  misc_feature 1..19: note = Description of Artificial Sequence: Synthetic oligonucleotide
  source 1..19: mol_type = other RNA
gggggcaggcagatcaggg

SEQ ID NO: 5604 - RNA, 19 nt, synthetic construct
  misc_feature 1..19: note = Description of Artificial Sequence: Synthetic oligonucleotide
  source 1..19: mol_type = other RNA
agggggcaggcagatcagg

SEQ ID NO: 5605 - RNA, 19 nt, synthetic construct
  misc_feature 1..19: note = Description of Artificial Sequence: Synthetic oligonucleotide
  source 1..19: mol_type = other RNA
cagggggcaggcagatcag

SEQ ID NO: 5606 - RNA, 19 nt, synthetic construct
  misc_feature 1..19: note = Description of Artificial Sequence: Synthetic oligonucleotide
  source 1..19: mol_type = other RNA
tcagggggcaggcagatca

SEQ ID NO: 5607 - RNA, 19 nt, synthetic construct
  misc_feature 1..19: note = Description of Artificial Sequence: Synthetic oligonucleotide
  source 1..19: mol_type = other RNA
ttcagggggcaggcagatc

SEQ ID NO: 5608 - RNA, 19 nt, synthetic construct
  misc_feature 1..19: note = Description of Artificial Sequence: Synthetic oligonucleotide
  source 1..19: mol_type = other RNA
attcagggggcaggcagat

SEQ ID NO: 5609 - RNA, 19 nt, synthetic construct
  misc_feature 1..19: note = Description of Artificial Sequence: Synthetic oligonucleotide
  source 1..19: mol_type = other RNA
cattcagggggcaggcaga

SEQ ID NO: 5610 - RNA, 19 nt, synthetic construct
  misc_feature 1..19: note = Description of Artificial Sequence: Synthetic oligonucleotide
  source 1..19: mol_type = other RNA
ccattcagggggcaggcag

SEQ ID NO: 5611 - RNA, 19 nt, synthetic construct
  misc_feature 1..19: note = Description of Artificial Sequence: Synthetic oligonucleotide
  source 1..19: mol_type = other RNA
accattcagggggcaggca

SEQ ID NO: 5612 - RNA, 19 nt, synthetic construct
  misc_feature 1..19: note = Description of Artificial Sequence: Synthetic oligonucleotide
  source 1..19: mol_type = other RNA
taccattcagggggcaggc

SEQ ID NO: 5613 - RNA, 19 nt, synthetic construct
  misc_feature 1..19: note = Description of Artificial Sequence: Synthetic oligonucleotide
  source 1..19: mol_type = other RNA
ataccattcagggggcagg

SEQ ID NO: 5614 - RNA, 19 nt, synthetic construct
  misc_feature 1..19: note = Description of Artificial Sequence: Synthetic oligonucleotide
  source 1..19: mol_type = other RNA
cataccattcagggggcag

SEQ ID NO: 5615 - RNA, 19 nt, synthetic construct
  misc_feature 1..19: note = Description of Artificial Sequence: Synthetic oligonucleotide
  source 1..19: mol_type = other RNA
acataccattcagggggca

SEQ ID NO: 5616 - RNA, 19 nt, synthetic construct
  misc_feature 1..19: note = Description of Artificial Sequence: Synthetic oligonucleotide
  source 1..19: mol_type = other RNA
cacataccattcagggggc

SEQ ID NO: 5617 - RNA, 19 nt, synthetic construct
  misc_feature 1..19: note = Description of Artificial Sequence: Synthetic oligonucleotide
  source 1..19: mol_type = other RNA
ccacataccattcaggggg

SEQ ID NO: 5618 - RNA, 19 nt, synthetic construct
  misc_feature 1..19: note = Description of Artificial Sequence: Synthetic oligonucleotide
  source 1..19: mol_type = other RNA
accacataccattcagggg

SEQ ID NO: 5619 - RNA, 19 nt, synthetic construct
  misc_feature 1..19: note = Description of Artificial Sequence: Synthetic oligonucleotide
  source 1..19: mol_type = other RNA
caccacataccattcaggg

SEQ ID NO: 5620 - RNA, 19 nt, synthetic construct
  misc_feature 1..19: note = Description of Artificial Sequence: Synthetic oligonucleotide
  source 1..19: mol_type = other RNA
gcaccacataccattcagg

SEQ ID NO: 5621 - RNA, 19 nt, synthetic construct
  misc_feature 1..19: note = Description of Artificial Sequence: Synthetic oligonucleotide
  source 1..19: mol_type = other RNA
ggcaccacataccattcag

SEQ ID NO: 5622 - RNA, 19 nt, synthetic construct
  misc_feature 1..19: note = Description of Artificial Sequence: Synthetic oligonucleotide
  source 1..19: mol_type = other RNA
aggcaccacataccattca

SEQ ID NO: 5623 - RNA, 19 nt, synthetic construct
  misc_feature 1..19: note = Description of Artificial Sequence: Synthetic oligonucleotide
  source 1..19: mol_type = other RNA
gaggcaccacataccattc

SEQ ID NO: 5624 - RNA, 19 nt, synthetic construct
  misc_feature 1..19: note = Description of Artificial Sequence: Synthetic oligonucleotide
  source 1..19: mol_type = other RNA
ggaggcaccacataccatt

SEQ ID NO: 5625 - RNA, 19 nt, synthetic construct
  misc_feature 1..19: note = Description of Artificial Sequence: Synthetic oligonucleotide
  source 1..19: mol_type = other RNA
tggaggcaccacataccat

SEQ ID NO: 5626 - RNA, 19 nt, synthetic construct
  misc_feature 1..19: note = Description of Artificial Sequence: Synthetic oligonucleotide
  source 1..19: mol_type = other RNA
ctggaggcaccacatacca

SEQ ID NO: 5627 - RNA, 19 nt, synthetic construct
  misc_feature 1..19: note = Description of Artificial Sequence: Synthetic oligonucleotide
  source 1..19: mol_type = other RNA
cctggaggcaccacatacc

SEQ ID NO: 5628 - RNA, 19 nt, synthetic construct
  misc_feature 1..19: note = Description of Artificial Sequence: Synthetic oligonucleotide
  source 1..19: mol_type = other RNA
ccctggaggcaccacatac

SEQ ID NO: 5629 - RNA, 19 nt, synthetic construct
  misc_feature 1..19: note = Description of Artificial Sequence: Synthetic oligonucleotide
  source 1..19: mol_type = other RNA
tccctggaggcaccacata

SEQ ID NO: 5630 - RNA, 19 nt, synthetic construct
  misc_feature 1..19: note = Description of Artificial Sequence: Synthetic oligonucleotide
  source 1..19: mol_type = other RNA
gtccctggaggcaccacat

SEQ ID NO: 5631 - RNA, 19 nt, synthetic construct
  misc_feature 1..19: note = Description of Artificial Sequence: Synthetic oligonucleotide
  source 1..19: mol_type = other RNA
ggtccctggaggcaccaca

SEQ ID NO: 5632 - RNA, 19 nt, synthetic construct
  misc_feature 1..19: note = Description of Artificial Sequence: Synthetic oligonucleotide
  source 1..19: mol_type = other RNA
tggtccctggaggcaccac

SEQ ID NO: 5633 - RNA, 19 nt, synthetic construct
  misc_feature 1..19: note = Description of Artificial Sequence: Synthetic oligonucleotide
  source 1..19: mol_type = other RNA
ttggtccctggaggcacca

SEQ ID NO: 5634 - RNA, 19 nt, synthetic construct
  misc_feature 1..19: note = Description of Artificial Sequence: Synthetic oligonucleotide
  source 1..19: mol_type = other RNA
cttggtccctggaggcacc

SEQ ID NO: 5635 - RNA, 19 nt, synthetic construct
  misc_feature 1..19: note = Description of Artificial Sequence: Synthetic oligonucleotide
  source 1..19: mol_type = other RNA
acttggtccctggaggcac

SEQ ID NO: 5636 - RNA, 19 nt, synthetic construct
  misc_feature 1..19: note = Description of Artificial Sequence: Synthetic oligonucleotide
  source 1..19: mol_type = other RNA
cacttggtccctggaggca

SEQ ID NO: 5637 - RNA, 19 nt, synthetic construct
  misc_feature 1..19: note = Description of Artificial Sequence: Synthetic oligonucleotide
  source 1..19: mol_type = other RNA
acacttggtccctggaggc

SEQ ID NO: 5638 - RNA, 19 nt, synthetic construct
  misc_feature 1..19: note = Description of Artificial Sequence: Synthetic oligonucleotide
  source 1..19: mol_type = other RNA
cacacttggtccctggagg

SEQ ID NO: 5639 - RNA, 19 nt, synthetic construct
  misc_feature 1..19: note = Description of Artificial Sequence: Synthetic oligonucleotide
  source 1..19: mol_type = other RNA
tcacacttggtccctggag

SEQ ID NO: 5640 - RNA, 19 nt, synthetic construct
  misc_feature 1..19: note = Description of Artificial Sequence: Synthetic oligonucleotide
  source 1..19: mol_type = other RNA
ctcacacttggtccctgga

SEQ ID NO: 5641 - RNA, 19 nt, synthetic construct
  misc_feature 1..19: note = Description of Artificial Sequence: Synthetic oligonucleotide
  source 1..19: mol_type = other RNA
tctcacacttggtccctgg

SEQ ID NO: 5642 - RNA, 19 nt, synthetic construct
  misc_feature 1..19: note = Description of Artificial Sequence: Synthetic oligonucleotide
  source 1..19: mol_type = other RNA
atctcacacttggtccctg

SEQ ID NO: 5643 - RNA, 19 nt, synthetic construct
  misc_feature 1..19: note = Description of Artificial Sequence: Synthetic oligonucleotide
  source 1..19: mol_type = other RNA
aatctcacacttggtccct

SEQ ID NO: 5644 - RNA, 19 nt, synthetic construct
  misc_feature 1..19: note = Description of Artificial Sequence: Synthetic oligonucleotide
  source 1..19: mol_type = other RNA
caatctcacacttggtccc

SEQ ID NO: 5645 - RNA, 19 nt, synthetic construct
  misc_feature 1..19: note = Description of Artificial Sequence: Synthetic oligonucleotide
  source 1..19: mol_type = other RNA
gcaatctcacacttggtcc

SEQ ID NO: 5646 - RNA, 19 nt, synthetic construct
  misc_feature 1..19: note = Description of Artificial Sequence: Synthetic oligonucleotide
  source 1..19: mol_type = other RNA
tgcaatctcacacttggtc

SEQ ID NO: 5647 - RNA, 19 nt, synthetic construct
  misc_feature 1..19: note = Description of Artificial Sequence: Synthetic oligonucleotide
  source 1..19: mol_type = other RNA
ctgcaatctcacacttggt

SEQ ID NO: 5648 - RNA, 19 nt, synthetic construct
  misc_feature 1..19: note = Description of Artificial Sequence: Synthetic oligonucleotide
  source 1..19: mol_type = other RNA
cctgcaatctcacacttgg

SEQ ID NO: 5649 - RNA, 19 nt, synthetic construct
  misc_feature 1..19: note = Description of Artificial Sequence: Synthetic oligonucleotide
  source 1..19: mol_type = other RNA
gcctgcaatctcacacttg

SEQ ID NO: 5650 - RNA, 19 nt, synthetic construct
  misc_feature 1..19: note = Description of Artificial Sequence: Synthetic oligonucleotide
  source 1..19: mol_type = other RNA
agcctgcaatctcacactt

SEQ ID NO: 5651 - RNA, 19 nt, synthetic construct
  misc_feature 1..19: note = Description of Artificial Sequence: Synthetic oligonucleotide
  source 1..19: mol_type = other RNA
cagcctgcaatctcacact

SEQ ID NO: 5652 - RNA, 19 nt, synthetic construct
  misc_feature 1..19: note = Description of Artificial Sequence: Synthetic oligonucleotide
  source 1..19: mol_type = other RNA
ccagcctgcaatctcacac

SEQ ID NO: 5653 - RNA, 19 nt, synthetic construct
  misc_feature 1..19: note = Description of Artificial Sequence: Synthetic oligonucleotide
  source 1..19: mol_type = other RNA
cccagcctgcaatctcaca

SEQ ID NO: 5654 - RNA, 19 nt, synthetic construct
  misc_feature 1..19: note = Description of Artificial Sequence: Synthetic oligonucleotide
  source 1..19: mol_type = other RNA
ccccagcctgcaatctcac

SEQ ID NO: 5655 - RNA, 19 nt, synthetic construct
  misc_feature 1..19: note = Description of Artificial Sequence: Synthetic oligonucleotide
  source 1..19: mol_type = other RNA
accccagcctgcaatctca

SEQ ID NO: 5656 - RNA, 19 nt, synthetic construct
  misc_feature 1..19: note = Description of Artificial Sequence: Synthetic oligonucleotide
  source 1..19: mol_type = other RNA
caccccagcctgcaatctc

SEQ ID NO: 5657 - RNA, 19 nt, synthetic construct
  misc_feature 1..19: note = Description of Artificial Sequence: Synthetic oligonucleotide
  source 1..19: mol_type = other RNA
tcaccccagcctgcaatct

SEQ ID NO: 5658 - RNA, 19 nt, synthetic construct
  misc_feature 1..19: note = Description of Artificial Sequence: Synthetic oligonucleotide
  source 1..19: mol_type = other RNA
ctcaccccagcctgcaatc

SEQ ID NO: 5659 - RNA, 19 nt, synthetic construct
  misc_feature 1..19: note = Description of Artificial Sequence: Synthetic oligonucleotide
  source 1..19: mol_type = other RNA
tctcaccccagcctgcaat

SEQ ID NO: 5660 - RNA, 19 nt, synthetic construct
  misc_feature 1..19: note = Description of Artificial Sequence: Synthetic oligonucleotide
  source 1..19: mol_type = other RNA
gtctcaccccagcctgcaa

SEQ ID NO: 5661 - RNA, 19 nt, synthetic construct
  misc_feature 1..19: note = Description of Artificial Sequence: Synthetic oligonucleotide
  source 1..19: mol_type = other RNA
ggtctcaccccagcctgca

SEQ ID NO: 5662 - RNA, 19 nt, synthetic construct
  misc_feature 1..19: note = Description of Artificial Sequence: Synthetic oligonucleotide
  source 1..19: mol_type = other RNA
tggtctcaccccagcctgc

SEQ ID NO: 5663 - RNA, 19 nt, synthetic construct
  misc_feature 1..19: note = Description of Artificial Sequence: Synthetic oligonucleotide
  source 1..19: mol_type = other RNA
ttggtctcaccccagcctg

SEQ ID NO: 5664 - RNA, 19 nt, synthetic construct
  misc_feature 1..19: note = Description of Artificial Sequence: Synthetic oligonucleotide
  source 1..19: mol_type = other RNA
tttggtctcaccccagcct

SEQ ID NO: 5665 - RNA, 19 nt, synthetic construct
  misc_feature 1..19: note = Description of Artificial Sequence: Synthetic oligonucleotide
  source 1..19: mol_type = other RNA
ctttggtctcaccccagcc

SEQ ID NO: 5666 - RNA, 19 nt, synthetic construct
  misc_feature 1..19: note = Description of Artificial Sequence: Synthetic oligonucleotide
  source 1..19: mol_type = other RNA
cctttggtctcaccccagc

SEQ ID NO: 5667 - RNA, 19 nt, synthetic construct
  misc_feature 1..19: note = Description of Artificial Sequence: Synthetic oligonucleotide
  source 1..19: mol_type = other RNA
acctttggtctcaccccag

SEQ ID NO: 5668 - RNA, 19 nt, synthetic construct
  misc_feature 1..19: note = Description of Artificial Sequence: Synthetic oligonucleotide
  source 1..19: mol_type = other RNA
tacctttggtctcacccca

SEQ ID NO: 5669 - RNA, 19 nt, synthetic construct
  misc_feature 1..19: note = Description of Artificial Sequence: Synthetic oligonucleotide
  source 1..19: mol_type = other RNA
gtacctttggtctcacccc

SEQ ID NO: 5670 - RNA, 19 nt, synthetic construct
  misc_feature 1..19: note = Description of Artificial Sequence: Synthetic oligonucleotide
  source 1..19: mol_type = other RNA
cgtacctttggtctcaccc

SEQ ID NO: 5671 - RNA, 19 nt, synthetic construct
  misc_feature 1..19: note = Description of Artificial Sequence: Synthetic oligonucleotide
  source 1..19: mol_type = other RNA
ccgtacctttggtctcacc

SEQ ID NO: 5672 - RNA, 19 nt, synthetic construct
  misc_feature 1..19: note = Description of Artificial Sequence: Synthetic oligonucleotide
  source 1..19: mol_type = other RNA
cccgtacctttggtctcac

SEQ ID NO: 5673 - RNA, 19 nt, synthetic construct
  misc_feature 1..19: note = Description of Artificial Sequence: Synthetic oligonucleotide
  source 1..19: mol_type = other RNA
acccgtacctttggtctca

SEQ ID NO: 5674 - RNA, 19 nt, synthetic construct
  misc_feature 1..19: note = Description of Artificial Sequence: Synthetic oligonucleotide
  source 1..19: mol_type = other RNA
tacccgtacctttggtctc

SEQ ID NO: 5675 - RNA, 19 nt, synthetic construct
  misc_feature 1..19: note = Description of Artificial Sequence: Synthetic oligonucleotide
  source 1..19: mol_type = other RNA
ttacccgtacctttggtct

SEQ ID NO: 5676 - RNA, 19 nt, synthetic construct
  misc_feature 1..19: note = Description of Artificial Sequence: Synthetic oligonucleotide
  source 1..19: mol_type = other RNA
attacccgtacctttggtc

SEQ ID NO: 5677 - RNA, 19 nt, synthetic construct
  misc_feature 1..19: note = Description of Artificial Sequence: Synthetic oligonucleotide
  source 1..19: mol_type = other RNA
cattacccgtacctttggt

SEQ ID NO: 5678 - RNA, 19 nt, synthetic construct
  misc_feature 1..19: note = Description of Artificial Sequence: Synthetic oligonucleotide
  source 1..19: mol_type = other RNA
tcattacccgtacctttgg

SEQ ID NO: 5679 - RNA, 19 nt, synthetic construct
  misc_feature 1..19: note = Description of Artificial Sequence: Synthetic oligonucleotide
  source 1..19: mol_type = other RNA
gtcattacccgtacctttg

SEQ ID NO: 5680 - RNA, 19 nt, synthetic construct
  misc_feature 1..19: note = Description of Artificial Sequence: Synthetic oligonucleotide
  source 1..19: mol_type = other RNA
tgtcattacccgtaccttt

SEQ ID NO: 5681 - RNA, 19 nt, synthetic construct
  misc_feature 1..19: note = Description of Artificial Sequence: Synthetic oligonucleotide
  source 1..19: mol_type = other RNA
gtgtcattacccgtacctt

SEQ ID NO: 5682 - RNA, 19 nt, synthetic construct
  misc_feature 1..19: note = Description of Artificial Sequence: Synthetic oligonucleotide
  source 1..19: mol_type = other RNA
tgtgtcattacccgtacct

SEQ ID NO: 5683 - RNA, 19 nt, synthetic construct
  misc_feature 1..19: note = Description of Artificial Sequence: Synthetic oligonucleotide
  source 1..19: mol_type = other RNA
ctgtgtcattacccgtacc

SEQ ID NO: 5684 - RNA, 19 nt, synthetic construct
  misc_feature 1..19: note = Description of Artificial Sequence: Synthetic oligonucleotide
  source 1..19: mol_type = other RNA
actgtgtcattacccgtac

SEQ ID NO: 5685 - RNA, 19 nt, synthetic construct
  misc_feature 1..19: note = Description of Artificial Sequence: Synthetic oligonucleotide
  source 1..19: mol_type = other RNA
gactgtgtcattacccgta

SEQ ID NO: 5686 - RNA, 19 nt, synthetic construct
  misc_feature 1..19: note = Description of Artificial Sequence: Synthetic oligonucleotide
  source 1..19: mol_type = other RNA
ggactgtgtcattacccgt

SEQ ID NO: 5687 - RNA, 19 nt, synthetic construct
  misc_feature 1..19: note = Description of Artificial Sequence: Synthetic oligonucleotide
  source 1..19: mol_type = other RNA
aggactgtgtcattacccg

SEQ ID NO: 5688 - RNA, 19 nt, synthetic construct
  misc_feature 1..19: note = Description of Artificial Sequence: Synthetic oligonucleotide
  source 1..19: mol_type = other RNA
taggactgtgtcattaccc

SEQ ID NO: 5689 - RNA, 19 nt, synthetic construct
  misc_feature 1..19: note = Description of Artificial Sequence: Synthetic oligonucleotide
  source 1..19: mol_type = other RNA
ttaggactgtgtcattacc

SEQ ID NO: 5690 - RNA, 19 nt, synthetic construct
  misc_feature 1..19: note = Description of Artificial Sequence: Synthetic oligonucleotide
  source 1..19: mol_type = other RNA
tttaggactgtgtcattac

SEQ ID NO: 5691 - RNA, 19 nt, synthetic construct
  misc_feature 1..19: note = Description of Artificial Sequence: Synthetic oligonucleotide
  source 1..19: mol_type = other RNA
atttaggactgtgtcatta

SEQ ID NO: 5692 - RNA, 19 nt, synthetic construct
  misc_feature 1..19: note = Description of Artificial Sequence: Synthetic oligonucleotide
  source 1..19: mol_type = other RNA
catttaggactgtgtcatt

SEQ ID NO: 5693 - RNA, 19 nt, synthetic construct
  misc_feature 1..19: note = Description of Artificial Sequence: Synthetic oligonucleotide
  source 1..19: mol_type = other RNA
acatttaggactgtgtcat

SEQ ID NO: 5694 - RNA, 19 nt, synthetic construct
  misc_feature 1..19: note = Description of Artificial Sequence: Synthetic oligonucleotide
  source 1..19: mol_type = other RNA
cacatttaggactgtgtca

SEQ ID NO: 5695 - RNA, 19 nt, synthetic construct
  misc_feature 1..19: note = Description of Artificial Sequence: Synthetic oligonucleotide
  source 1..19: mol_type = other RNA
ccacatttaggactgtgtc

SEQ ID NO: 5696 - RNA, 19 nt, synthetic construct
  misc_feature 1..19: note = Description of Artificial Sequence: Synthetic oligonucleotide
  source 1..19: mol_type = other RNA
gccacatttaggactgtgt

SEQ ID NO: 5697 - RNA, 19 nt, synthetic construct
  misc_feature 1..19: note = Description of Artificial Sequence: Synthetic oligonucleotide
  source 1..19: mol_type = other RNA
ggccacatttaggactgtg

SEQ ID NO: 5698 - RNA, 19 nt, synthetic construct
  misc_feature 1..19: note = Description of Artificial Sequence: Synthetic oligonucleotide
  source 1..19: mol_type = other RNA
aggccacatttaggactgt

SEQ ID NO: 5699 - RNA, 19 nt, synthetic construct
  misc_feature 1..19: note = Description of Artificial Sequence: Synthetic oligonucleotide
  source 1..19: mol_type = other RNA
aaggccacatttaggactg

SEQ ID NO: 5700 - RNA, 19 nt, synthetic construct
  misc_feature 1..19: note = Description of Artificial Sequence: Synthetic oligonucleotide
  source 1..19: mol_type = other RNA
caaggccacatttaggact

SEQ ID NO: 5701 - RNA, 19 nt, synthetic construct
  misc_feature 1..19: note = Description of Artificial Sequence: Synthetic oligonucleotide
  source 1..19: mol_type = other RNA
gcaaggccacatttaggac

SEQ ID NO: 5702 - RNA, 19 nt, synthetic construct
  misc_feature 1..19: note = Description of Artificial Sequence: Synthetic oligonucleotide
  source 1..19: mol_type = other RNA
agcaaggccacatttagga

SEQ ID NO: 5703 - RNA, 19 nt, synthetic construct
  misc_feature 1..19: note = Description of Artificial Sequence: Synthetic oligonucleotide
  source 1..19: mol_type = other RNA
cagcaaggccacatttagg

SEQ ID NO: 5704 - RNA, 19 nt, synthetic construct
  misc_feature 1..19: note = Description of Artificial Sequence: Synthetic oligonucleotide
  source 1..19: mol_type = other RNA
tcagcaaggccacatttag

SEQ ID NO: 5705 - RNA, 19 nt, synthetic construct
  misc_feature 1..19: note = Description of Artificial Sequence: Synthetic oligonucleotide
  source 1..19: mol_type = other RNA
ttcagcaaggccacattta

SEQ ID NO: 5706 - RNA, 19 nt, synthetic construct
  misc_feature 1..19: note = Description of Artificial Sequence: Synthetic oligonucleotide
  source 1..19: mol_type = other RNA
attcagcaaggccacattt

SEQ ID NO: 5707 - RNA, 19 nt, synthetic construct
  misc_feature 1..19: note = Description of Artificial Sequence: Synthetic oligonucleotide
  source 1..19: mol_type = other RNA
cattcagcaaggccacatt

SEQ ID NO: 5708 - RNA, 19 nt, synthetic construct
  misc_feature 1..19: note = Description of Artificial Sequence: Synthetic oligonucleotide
  source 1..19: mol_type = other RNA
acattcagcaaggccacat

SEQ ID NO: 5709 - RNA, 19 nt, synthetic construct
  misc_feature 1..19: note = Description of Artificial Sequence: Synthetic oligonucleotide
  source 1..19: mol_type = other RNA
gacattcagcaaggccaca

SEQ ID NO: 5710 - RNA, 19 nt, synthetic construct
  misc_feature 1..19: note = Description of Artificial Sequence: Synthetic oligonucleotide
  source 1..19: mol_type = other RNA
tgacattcagcaaggccac

SEQ ID NO: 5711 - RNA, 19 nt, synthetic construct
  misc_feature 1..19: note = Description of Artificial Sequence: Synthetic oligonucleotide
  source 1..19: mol_type = other RNA
atgacattcagcaaggcca

SEQ ID NO: 5712 - RNA, 19 nt, synthetic construct
  misc_feature 1..19: note = Description of Artificial Sequence: Synthetic oligonucleotide
  source 1..19: mol_type = other RNA
gatgacattcagcaaggcc

SEQ ID NO: 5713 - RNA, 19 nt, synthetic construct
  misc_feature 1..19: note = Description of Artificial Sequence: Synthetic oligonucleotide
  source 1..19: mol_type = other RNA
agatgacattcagcaaggc

SEQ ID NO: 5714 - RNA, 19 nt, synthetic construct
  misc_feature 1..19: note = Description of Artificial Sequence: Synthetic oligonucleotide
  source 1..19: mol_type = other RNA
gagatgacattcagcaagg

SEQ ID NO: 5715 - RNA, 19 nt, synthetic construct
  misc_feature 1..19: note = Description of Artificial Sequence: Synthetic oligonucleotide
  source 1..19: mol_type = other RNA
ggagatgacattcagcaag

SEQ ID NO: 5716 - RNA, 19 nt, synthetic construct
  misc_feature 1..19: note = Description of Artificial Sequence: Synthetic oligonucleotide
  source 1..19: mol_type = other RNA
tggagatgacattcagcaa

SEQ ID NO: 5717 - RNA, 19 nt, synthetic construct
  misc_feature 1..19: note = Description of Artificial Sequence: Synthetic oligonucleotide
  source 1..19: mol_type = other RNA
ttggagatgacattcagca

SEQ ID NO: 5718 - RNA, 19 nt, synthetic construct
  misc_feature 1..19: note = Description of Artificial Sequence: Synthetic oligonucleotide
  source 1..19: mol_type = other RNA
gttggagatgacattcagc

SEQ ID NO: 5719 - RNA, 19 nt, synthetic construct
  misc_feature 1..19: note = Description of Artificial Sequence: Synthetic oligonucleotide
  source 1..19: mol_type = other RNA
ggttggagatgacattcag

SEQ ID NO: 5720 - RNA, 19 nt, synthetic construct
  misc_feature 1..19: note = Description of Artificial Sequence: Synthetic oligonucleotide
  source 1..19: mol_type = other RNA
tggttggagatgacattca

SEQ ID NO: 5721 - RNA, 19 nt, synthetic construct
  misc_feature 1..19: note = Description of Artificial Sequence: Synthetic oligonucleotide
  source 1..19: mol_type = other RNA
ctggttggagatgacattc

SEQ ID NO: 5722 - RNA, 19 nt, synthetic construct
  misc_feature 1..19: note = Description of Artificial Sequence: Synthetic oligonucleotide
  source 1..19: mol_type = other RNA
cctggttggagatgacatt

SEQ ID NO: 5723 - RNA, 19 nt, synthetic construct
  misc_feature 1..19: note = Description of Artificial Sequence: Synthetic oligonucleotide
  source 1..19: mol_type = other RNA
tcctggttggagatgacat

SEQ ID NO: 5724 - RNA, 19 nt, synthetic construct
  misc_feature 1..19: note = Description of Artificial Sequence: Synthetic oligonucleotide
  source 1..19: mol_type = other RNA
ctcctggttggagatgaca

SEQ ID NO: 5725 - RNA, 19 nt, synthetic construct
  misc_feature 1..19: note = Description of Artificial Sequence: Synthetic oligonucleotide
  source 1..19: mol_type = other RNA
actcctggttggagatgac

SEQ ID NO: 5726 - RNA, 19 nt, synthetic construct
  misc_feature 1..19: note = Description of Artificial Sequence: Synthetic oligonucleotide
  source 1..19: mol_type = other RNA
cactcctggttggagatga

SEQ ID NO: 5727 - RNA, 19 nt, synthetic construct
  misc_feature 1..19: note = Description of Artificial Sequence: Synthetic oligonucleotide
  source 1..19: mol_type = other RNA
acactcctggttggagatg

SEQ ID NO: 5728 - RNA, 19 nt, synthetic construct
  misc_feature 1..19: note = Description of Artificial Sequence: Synthetic oligonucleotide
  source 1..19: mol_type = other RNA
tacactcctggttggagat

SEQ ID NO: 5729 - RNA, 19 nt, synthetic construct
  misc_feature 1..19: note = Description of Artificial Sequence: Synthetic oligonucleotide
  source 1..19: mol_type = other RNA
ttacactcctggttggaga

SEQ ID NO: 5730 - RNA, 19 nt, synthetic construct
  misc_feature 1..19: note = Description of Artificial Sequence: Synthetic oligonucleotide
  source 1..19: mol_type = other RNA
gttacactcctggttggag

SEQ ID NO: 5731 - RNA, 19 nt, synthetic construct
  misc_feature 1..19: note = Description of Artificial Sequence: Synthetic oligonucleotide
  source 1..19: mol_type = other RNA
tgttacactcctggttgga

SEQ ID NO: 5732 - RNA, 19 nt, synthetic construct
  misc_feature 1..19: note = Description of Artificial Sequence: Synthetic oligonucleotide
  source 1..19: mol_type = other RNA
atgttacactcctggttgg

SEQ ID NO: 5733 - RNA, 19 nt, synthetic construct
  misc_feature 1..19: note = Description of Artificial Sequence: Synthetic oligonucleotide
  source 1..19: mol_type = other RNA
gatgttacactcctggttg

SEQ ID NO: 5734 - RNA, 19 nt, synthetic construct
  misc_feature 1..19: note = Description of Artificial Sequence: Synthetic oligonucleotide
  source 1..19: mol_type = other RNA
tgatgttacactcctggtt

SEQ ID NO: 5735 - RNA, 19 nt, synthetic construct
  misc_feature 1..19: note = Description of Artificial Sequence: Synthetic oligonucleotide
  source 1..19: mol_type = other RNA
ttgatgttacactcctggt

SEQ ID NO: 5736 - RNA, 19 nt, synthetic construct
  misc_feature 1..19: note = Description of Artificial Sequence: Synthetic oligonucleotide
  source 1..19: mol_type = other RNA
cttgatgttacactcctgg

SEQ ID NO: 5737 - RNA, 19 nt, synthetic construct
  misc_feature 1..19: note = Description of Artificial Sequence: Synthetic oligonucleotide
  source 1..19: mol_type = other RNA
gcttgatgttacactcctg

SEQ ID NO: 5738 - RNA, 19 nt, synthetic construct
  misc_feature 1..19: note = Description of Artificial Sequence: Synthetic oligonucleotide
  source 1..19: mol_type = other RNA
tgcttgatgttacactcct

SEQ ID NO: 5739 - RNA, 19 nt, synthetic construct
  misc_feature 1..19: note = Description of Artificial Sequence: Synthetic oligonucleotide
  source 1..19: mol_type = other RNA
gtgcttgatgttacactcc

SEQ ID NO: 5740 - RNA, 19 nt, synthetic construct
  misc_feature 1..19: note = Description of Artificial Sequence: Synthetic oligonucleotide
  source 1..19: mol_type = other RNA
ggtgcttgatgttacactc

SEQ ID NO: 5741 - RNA, 19 nt, synthetic construct
  misc_feature 1..19: note = Description of Artificial Sequence: Synthetic oligonucleotide
  source 1..19: mol_type = other RNA
cggtgcttgatgttacact

SEQ ID NO: 5742 - RNA, 19 nt, synthetic construct
  misc_feature 1..19: note = Description of Artificial Sequence: Synthetic oligonucleotide
  source 1..19: mol_type = other RNA
tcggtgcttgatgttacac

SEQ ID NO: 5743 - RNA, 19 nt, synthetic construct
  misc_feature 1..19: note = Description of Artificial Sequence: Synthetic oligonucleotide
  source 1..19: mol_type = other RNA
ctcggtgcttgatgttaca

SEQ ID NO: 5744 - RNA, 19 nt, synthetic construct
  misc_feature 1..19: note = Description of Artificial Sequence: Synthetic oligonucleotide
  source 1..19: mol_type = other RNA
cctcggtgcttgatgttac

SEQ ID NO: 5745 - RNA, 19 nt, synthetic construct
  misc_feature 1..19: note = Description of Artificial Sequence: Synthetic oligonucleotide
  source 1..19: mol_type = other RNA
tcctcggtgcttgatgtta

SEQ ID NO: 5746 - RNA, 19 nt, synthetic construct
  misc_feature 1..19: note = Description of Artificial Sequence: Synthetic oligonucleotide
  source 1..19: mol_type = other RNA
gtcctcggtgcttgatgtt

SEQ ID NO: 5747 - RNA, 19 nt, synthetic construct
  misc_feature 1..19: note = Description of Artificial Sequence: Synthetic oligonucleotide
  source 1..19: mol_type = other RNA
cgtcctcggtgcttgatgt

SEQ ID NO: 5748 - RNA, 19 nt, synthetic construct
  misc_feature 1..19: note = Description of Artificial Sequence: Synthetic oligonucleotide
  source 1..19: mol_type = other RNA
acgtcctcggtgcttgatg

SEQ ID NO: 5749 - RNA, 19 nt, synthetic construct
  misc_feature 1..19: note = Description of Artificial Sequence: Synthetic oligonucleotide
  source 1..19: mol_type = other RNA
cacgtcctcggtgcttgat

SEQ ID NO: 5750 - RNA, 19 nt, synthetic construct
  misc_feature 1..19: note = Description of Artificial Sequence: Synthetic oligonucleotide
  source 1..19: mol_type = other RNA
acacgtcctcggtgcttga

SEQ ID NO: 5751 - RNA, 19 nt, synthetic construct
  misc_feature 1..19: note = Description of Artificial Sequence: Synthetic oligonucleotide
  source 1..19: mol_type = other RNA
cacacgtcctcggtgcttg

SEQ ID NO: 5752 - RNA, 19 nt, synthetic construct
  misc_feature 1..19: note = Description of Artificial Sequence: Synthetic oligonucleotide
  source 1..19: mol_type = other RNA
gcacacgtcctcggtgctt

SEQ ID NO: 5753 - RNA, 19 nt, synthetic construct
  misc_feature 1..19: note = Description of Artificial Sequence: Synthetic oligonucleotide
  source 1..19: mol_type = other RNA
cgcacacgtcctcggtgct

SEQ ID NO: 5754 - RNA, 19 nt, synthetic construct
  misc_feature 1..19: note = Description of Artificial Sequence: Synthetic oligonucleotide
  source 1..19: mol_type = other RNA
ccgcacacgtcctcggtgc

SEQ ID NO: 5755 - RNA, 19 nt, synthetic construct
  misc_feature 1..19: note = Description of Artificial Sequence: Synthetic oligonucleotide
  source 1..19: mol_type = other RNA
cccgcacacgtcctcggtg

SEQ ID NO: 5756 - RNA, 19 nt, synthetic construct
  misc_feature 1..19: note = Description of Artificial Sequence: Synthetic oligonucleotide
  source 1..19: mol_type = other RNA
tcccgcacacgtcctcggt

SEQ ID NO: 5757 - RNA, 19 nt, synthetic construct
  misc_feature 1..19: note = Description of Artificial Sequence: Synthetic oligonucleotide
  source 1..19: mol_type = other RNA
ctcccgcacacgtcctcgg

SEQ ID NO: 5758 - RNA, 19 nt, synthetic construct
  misc_feature 1..19: note = Description of Artificial Sequence: Synthetic oligonucleotide
  source 1..19: mol_type = other RNA
tctcccgcacacgtcctcg

SEQ ID NO: 5759 - RNA, 19 nt, synthetic construct
  misc_feature 1..19: note = Description of Artificial Sequence: Synthetic oligonucleotide
  source 1..19: mol_type = other RNA
ctctcccgcacacgtcctc

SEQ ID NO: 5760 - RNA, 19 nt, synthetic construct
  misc_feature 1..19: note = Description of Artificial Sequence: Synthetic oligonucleotide
  source 1..19: mol_type = other RNA
actctcccgcacacgtcct

SEQ ID NO: 5761 - RNA, 19 nt, synthetic construct
  misc_feature 1..19: note = Description of Artificial Sequence: Synthetic oligonucleotide
  source 1..19: mol_type = other RNA
cactctcccgcacacgtcc

SEQ ID NO: 5762 - RNA, 19 nt, synthetic construct
  misc_feature 1..19: note = Description of Artificial Sequence: Synthetic oligonucleotide
  source 1..19: mol_type = other RNA
tcactctcccgcacacgtc

SEQ ID NO: 5763 - RNA, 19 nt, synthetic construct
  misc_feature 1..19: note = Description of Artificial Sequence: Synthetic oligonucleotide
  source 1..19: mol_type = other RNA
ctcactctcccgcacacgt

SEQ ID NO: 5764 - RNA, 19 nt, synthetic construct
  misc_feature 1..19: note = Description of Artificial Sequence: Synthetic oligonucleotide
  source 1..19: mol_type = other RNA
tctcactctcccgcacacg

SEQ ID NO: 5765 - RNA, 19 nt, synthetic construct
  misc_feature 1..19: note = Description of Artificial Sequence: Synthetic oligonucleotide
  source 1..19: mol_type = other RNA
atctcactctcccgcacac

SEQ ID NO: 5766 - RNA, 19 nt, synthetic construct
  misc_feature 1..19: note = Description of Artificial Sequence: Synthetic oligonucleotide
  source 1..19: mol_type = other RNA
catctcactctcccgcaca

SEQ ID NO: 5767 - RNA, 19 nt, synthetic construct
  misc_feature 1..19: note = Description of Artificial Sequence: Synthetic oligonucleotide
  source 1..19: mol_type = other RNA
acatctcactctcccgcac

SEQ ID NO: 5768 - RNA, 19 nt, synthetic construct
  misc_feature 1..19: note = Description of Artificial Sequence: Synthetic oligonucleotide
  source 1..19: mol_type = other RNA
cacatctcactctcccgca

SEQ ID NO: 5769 - RNA, 19 nt, synthetic construct
  misc_feature 1..19: note = Description of Artificial Sequence: Synthetic oligonucleotide
  source 1..19: mol_type = other RNA
gcacatctcactctcccgc

SEQ ID NO: 5770 - RNA, 19 nt, synthetic construct
  misc_feature 1..19: note = Description of Artificial Sequence: Synthetic oligonucleotide
  source 1..19: mol_type = other RNA
tgcacatctcactctcccg

SEQ ID NO: 5771 - RNA, 19 nt, synthetic construct
  misc_feature 1..19: note = Description of Artificial Sequence: Synthetic oligonucleotide
  source 1..19: mol_type = other RNA
gtgcacatctcactctccc

SEQ ID NO: 5772 - RNA, 19 nt, synthetic construct
  misc_feature 1..19: note = Description of Artificial Sequence: Synthetic oligonucleotide
  source 1..19: mol_type = other RNA
agtgcacatctcactctcc

SEQ ID NO: 5773 - RNA, 19 nt, synthetic construct
  misc_feature 1..19: note = Description of Artificial Sequence: Synthetic oligonucleotide
  source 1..19: mol_type = other RNA
cagtgcacatctcactctc

SEQ ID NO: 5774 - RNA, 19 nt, synthetic construct
  misc_feature 1..19: note = Description of Artificial Sequence: Synthetic oligonucleotide
  source 1..19: mol_type = other RNA
tcagtgcacatctcactct

SEQ ID NO: 5775 - RNA, 19 nt, synthetic construct
  misc_feature 1..19: note = Description of Artificial Sequence: Synthetic oligonucleotide
  source 1..19: mol_type = other RNA
ctcagtgcacatctcactc

SEQ ID NO: 5776 - RNA, 19 nt, synthetic construct
  misc_feature 1..19: note = Description of Artificial Sequence: Synthetic oligonucleotide
  source 1..19: mol_type = other RNA
cctcagtgcacatctcact

SEQ ID NO: 5777 - RNA, 19 nt, synthetic construct
  misc_feature 1..19: note = Description of Artificial Sequence: Synthetic oligonucleotide
  source 1..19: mol_type = other RNA
ccctcagtgcacatctcac

SEQ ID NO: 5778 - RNA, 19 nt, synthetic construct
  misc_feature 1..19: note = Description of Artificial Sequence: Synthetic oligonucleotide
  source 1..19: mol_type = other RNA
tccctcagtgcacatctca

SEQ ID NO: 5779 - RNA, 19 nt, synthetic construct
  misc_feature 1..19: note = Description of Artificial Sequence: Synthetic oligonucleotide
  source 1..19: mol_type = other RNA
gtccctcagtgcacatctc

SEQ ID NO: 5780 - RNA, 19 nt, synthetic construct
  misc_feature 1..19: note = Description of Artificial Sequence: Synthetic oligonucleotide
  source 1..19: mol_type = other RNA
agtccctcagtgcacatct

SEQ ID NO: 5781 - RNA, 19 nt, synthetic construct
  misc_feature 1..19: note = Description of Artificial Sequence: Synthetic oligonucleotide
  source 1..19: mol_type = other RNA
cagtccctcagtgcacatc

SEQ ID NO: 5782 - RNA, 19 nt, synthetic construct
  misc_feature 1..19: note = Description of Artificial Sequence: Synthetic oligonucleotide
  source 1..19: mol_type = other RNA
acagtccctcagtgcacat

SEQ ID NO: 5783 - RNA, 19 nt, synthetic construct
  misc_feature 1..19: note = Description of Artificial Sequence: Synthetic oligonucleotide
  source 1..19: mol_type = other RNA
aacagtccctcagtgcaca

SEQ ID NO: 5784 - RNA, 19 nt, synthetic construct
  misc_feature 1..19: note = Description of Artificial Sequence: Synthetic oligonucleotide
  source 1..19: mol_type = other RNA
caacagtccctcagtgcac

SEQ ID NO: 5785 - RNA, 19 nt, synthetic construct
  misc_feature 1..19: note = Description of Artificial Sequence: Synthetic oligonucleotide
  source 1..19: mol_type = other RNA
ccaacagtccctcagtgca

SEQ ID NO: 5786 - RNA, 19 nt, synthetic construct
  misc_feature 1..19: note = Description of Artificial Sequence: Synthetic oligonucleotide
  source 1..19: mol_type = other RNA
gccaacagtccctcagtgc

SEQ ID NO: 5787 - RNA, 19 nt, synthetic construct
  misc_feature 1..19: note = Description of Artificial Sequence: Synthetic oligonucleotide
  source 1..19: mol_type = other RNA
ggccaacagtccctcagtg

SEQ ID NO: 5788 - RNA, 19 nt, synthetic construct
  misc_feature 1..19: note = Description of Artificial Sequence: Synthetic oligonucleotide
  source 1..19: mol_type = other RNA
gggccaacagtccctcagt

SEQ ID NO: 5789 - RNA, 19 nt, synthetic construct
  misc_feature 1..19: note = Description of Artificial Sequence: Synthetic oligonucleotide
  source 1..19: mol_type = other RNA
ggggccaacagtccctcag

SEQ ID NO: 5790 - RNA, 19 nt, synthetic construct
  misc_feature 1..19: note = Description of Artificial Sequence: Synthetic oligonucleotide
  source 1..19: mol_type = other RNA
aggggccaacagtccctca

SEQ ID NO: 5791 - RNA, 19 nt, synthetic construct
  misc_feature 1..19: note = Description of Artificial Sequence: Synthetic oligonucleotide
  source 1..19: mol_type = other RNA
caggggccaacagtccctc

SEQ ID NO: 5792 - RNA, 19 nt, synthetic construct
  misc_feature 1..19: note = Description of Artificial Sequence: Synthetic oligonucleotide
  source 1..19: mol_type = other RNA
acaggggccaacagtccct

SEQ ID NO: 5793 - RNA, 19 nt, synthetic construct
  misc_feature 1..19: note = Description of Artificial Sequence: Synthetic oligonucleotide
  source 1..19: mol_type = other RNA
cacaggggccaacagtccc

SEQ ID NO: 5794 - RNA, 19 nt, synthetic construct
  misc_feature 1..19: note = Description of Artificial Sequence: Synthetic oligonucleotide
  source 1..19: mol_type = other RNA
ccacaggggccaacagtcc

SEQ ID NO: 5795 - RNA, 19 nt, synthetic construct
  misc_feature 1..19: note = Description of Artificial Sequence: Synthetic oligonucleotide
  source 1..19: mol_type = other RNA
cccacaggggccaacagtc

SEQ ID NO: 5796 - RNA, 19 nt, synthetic construct
  misc_feature 1..19: note = Description of Artificial Sequence: Synthetic oligonucleotide
  source 1..19: mol_type = other RNA
ccccacaggggccaacagt

SEQ ID NO: 5797 - RNA, 19 nt, synthetic construct
  misc_feature 1..19: note = Description of Artificial Sequence: Synthetic oligonucleotide
  source 1..19: mol_type = other RNA
cccccacaggggccaacag

SEQ ID NO: 5798 - RNA, 19 nt, synthetic construct
  misc_feature 1..19: note = Description of Artificial Sequence: Synthetic oligonucleotide
  source 1..19: mol_type = other RNA
gcccccacaggggccaaca

SEQ ID NO: 5799 - RNA, 19 nt, synthetic construct
  misc_feature 1..19: note = Description of Artificial Sequence: Synthetic oligonucleotide
  source 1..19: mol_type = other RNA
ggcccccacaggggccaac

SEQ ID NO: 5800 - RNA, 19 nt, synthetic construct
  misc_feature 1..19: note = Description of Artificial Sequence: Synthetic oligonucleotide
  source 1..19: mol_type = other RNA
aggcccccacaggggccaa

SEQ ID NO: 5801 - RNA, 19 nt, synthetic construct
  misc_feature 1..19: note = Description of Artificial Sequence: Synthetic oligonucleotide
  source 1..19: mol_type = other RNA
caggcccccacaggggcca

SEQ ID NO: 5802 - RNA, 19 nt, synthetic construct
  misc_feature 1..19: note = Description of Artificial Sequence: Synthetic oligonucleotide
  source 1..19: mol_type = other RNA
acaggcccccacaggggcc

SEQ ID NO: 5803 - RNA, 19 nt, synthetic construct
  misc_feature 1..19: note = Description of Artificial Sequence: Synthetic oligonucleotide
  source 1..19: mol_type = other RNA
cacaggcccccacaggggc

SEQ ID NO: 5804 - RNA, 19 nt, synthetic construct
  misc_feature 1..19: note = Description of Artificial Sequence: Synthetic oligonucleotide
  source 1..19: mol_type = other RNA
tcacaggcccccacagggg

SEQ ID NO: 5805 - RNA, 19 nt, synthetic construct
  misc_feature 1..19: note = Description of Artificial Sequence: Synthetic oligonucleotide
  source 1..19: mol_type = other RNA
ctcacaggcccccacaggg

SEQ ID NO: 5806 - RNA, 19 nt, synthetic construct
  misc_feature 1..19: note = Description of Artificial Sequence: Synthetic oligonucleotide
  source 1..19: mol_type = other RNA
cctcacaggcccccacagg

SEQ ID NO: 5807 - RNA, 19 nt, synthetic construct
  misc_feature 1..19: note = Description of Artificial Sequence: Synthetic oligonucleotide
  source 1..19: mol_type = other RNA
ccctcacaggcccccacag

SEQ ID NO: 5808 - RNA, 19 nt, synthetic construct
  misc_feature 1..19: note = Description of Artificial Sequence: Synthetic oligonucleotide
  source 1..19: mol_type = other RNA
accctcacaggcccccaca

SEQ ID NO: 5809 - RNA, 19 nt, synthetic construct
  misc_feature 1..19: note = Description of Artificial Sequence: Synthetic oligonucleotide
  source 1..19: mol_type = other RNA
caccctcacaggcccccac

SEQ ID NO: 5810 - RNA, 19 nt, synthetic construct
  misc_feature 1..19: note = Description of Artificial Sequence: Synthetic oligonucleotide
  source 1..19: mol_type = other RNA
tcaccctcacaggccccca

SEQ ID NO: 5811 - RNA, 19 nt, synthetic construct
  misc_feature 1..19: note = Description of Artificial Sequence: Synthetic oligonucleotide
  source 1..19: mol_type = other RNA
gtcaccctcacaggccccc

SEQ ID NO: 5812 - RNA, 19 nt, synthetic construct
  misc_feature 1..19: note = Description of Artificial Sequence: Synthetic oligonucleotide
  source 1..19: mol_type = other RNA
agtcaccctcacaggcccc

SEQ ID NO: 5813 - RNA, 19 nt, synthetic construct
  misc_feature 1..19: note = Description of Artificial Sequence: Synthetic oligonucleotide
  source 1..19: mol_type = other RNA
tagtcaccctcacaggccc

SEQ ID NO: 5814 - RNA, 19 nt, synthetic construct
  misc_feature 1..19: note = Description of Artificial Sequence: Synthetic oligonucleotide
  source 1..19: mol_type = other RNA
gtagtcaccctcacaggcc

SEQ ID NO: 5815 - RNA, 19 nt, synthetic construct
  misc_feature 1..19: note = Description of Artificial Sequence: Synthetic oligonucleotide
  source 1..19: mol_type = other RNA
cgtagtcaccctcacaggc

SEQ ID NO: 5816 - RNA, 19 nt, synthetic construct
  misc_feature 1..19: note = Description of Artificial Sequence: Synthetic oligonucleotide
  source 1..19: mol_type = other RNA
ccgtagtcaccctcacagg

SEQ ID NO: 5817 - RNA, 19 nt, synthetic construct
  misc_feature 1..19: note = Description of Artificial Sequence: Synthetic oligonucleotide
  source 1..19: mol_type = other RNA
cccgtagtcaccctcacag

SEQ ID NO: 5818 - RNA, 19 nt, synthetic construct
  misc_feature 1..19: note = Description of Artificial Sequence: Synthetic oligonucleotide
  source 1..19: mol_type = other RNA
ccccgtagtcaccctcaca

SEQ ID NO: 5819 - RNA, 19 nt, synthetic construct
  misc_feature 1..19: note = Description of Artificial Sequence: Synthetic oligonucleotide
  source 1..19: mol_type = other RNA
cccccgtagtcaccctcac

SEQ ID NO: 5820 - RNA, 19 nt, synthetic construct
  misc_feature 1..19: note = Description of Artificial Sequence: Synthetic oligonucleotide
  source 1..19: mol_type = other RNA
gcccccgtagtcaccctca

SEQ ID NO: 5821 - RNA, 19 nt, synthetic construct
  misc_feature 1..19: note = Description of Artificial Sequence: Synthetic oligonucleotide
  source 1..19: mol_type = other RNA
ggcccccgtagtcaccctc

SEQ ID NO: 5822 - RNA, 19 nt, synthetic construct
  misc_feature 1..19: note = Description of Artificial Sequence: Synthetic oligonucleotide
  source 1..19: mol_type = other RNA
gggcccccgtagtcaccct

SEQ ID NO: 5823 - RNA, 19 nt, synthetic construct
  misc_feature 1..19: note = Description of Artificial Sequence: Synthetic oligonucleotide
  source 1..19: mol_type = other RNA
tgggcccccgtagtcaccc

SEQ ID NO: 5824 - RNA, 19 nt, synthetic construct
  misc_feature 1..19: note = Description of Artificial Sequence: Synthetic oligonucleotide
  source 1..19: mol_type = other RNA
gtgggcccccgtagtcacc

SEQ ID NO: 5825 - RNA, 19 nt, synthetic construct
  misc_feature 1..19: note = Description of Artificial Sequence: Synthetic oligonucleotide
  source 1..19: mol_type = other RNA
agtgggcccccgtagtcac

SEQ ID NO: 5826 - RNA, 19 nt, synthetic construct
  misc_feature 1..19: note = Description of Artificial Sequence: Synthetic oligonucleotide
  source 1..19: mol_type = other RNA
aagtgggcccccgtagtca

SEQ ID NO: 5827 - RNA, 19 nt, synthetic construct
  misc_feature 1..19: note = Description of Artificial Sequence: Synthetic oligonucleotide
  source 1..19: mol_type = other RNA
caagtgggcccccgtagtc

SEQ ID NO: 5828 - RNA, 19 nt, synthetic construct
  misc_feature 1..19: note = Description of Artificial Sequence: Synthetic oligonucleotide
  source 1..19: mol_type = other RNA
gcaagtgggcccccgtagt

SEQ ID NO: 5829 - RNA, 19 nt, synthetic construct
  misc_feature 1..19: note = Description of Artificial Sequence: Synthetic oligonucleotide
  source 1..19: mol_type = other RNA
ggcaagtgggcccccgtag

SEQ ID NO: 5830 - RNA, 19 nt, synthetic construct
  misc_feature 1..19: note = Description of Artificial Sequence: Synthetic oligonucleotide
  source 1..19: mol_type = other RNA
aggcaagtgggcccccgta

SEQ ID NO: 5831 - RNA, 19 nt, synthetic construct
  misc_feature 1..19: note = Description of Artificial Sequence: Synthetic oligonucleotide
  source 1..19: mol_type = other RNA
caggcaagtgggcccccgt

SEQ ID NO: 5832 - RNA, 19 nt, synthetic construct
  misc_feature 1..19: note = Description of Artificial Sequence: Synthetic oligonucleotide
  source 1..19: mol_type = other RNA
gcaggcaagtgggcccccg

SEQ ID NO: 5833 - RNA, 19 nt, synthetic construct
  misc_feature 1..19: note = Description of Artificial Sequence: Synthetic oligonucleotide
  source 1..19: mol_type = other RNA
agcaggcaagtgggccccc

SEQ ID NO: 5834 - RNA, 19 nt, synthetic construct
  misc_feature 1..19: note = Description of Artificial Sequence: Synthetic oligonucleotide
  source 1..19: mol_type = other RNA
aagcaggcaagtgggcccc

SEQ ID NO: 5835 - RNA, 19 nt, synthetic construct
  misc_feature 1..19: note = Description of Artificial Sequence: Synthetic oligonucleotide
  source 1..19: mol_type = other RNA
aaagcaggcaagtgggccc

SEQ ID NO: 5836 - RNA, 19 nt, synthetic construct
  misc_feature 1..19: note = Description of Artificial Sequence: Synthetic oligonucleotide
  source 1..19: mol_type = other RNA
taaagcaggcaagtgggcc

SEQ ID NO: 5837 - RNA, 19 nt, synthetic construct
  misc_feature 1..19: note = Description of Artificial Sequence: Synthetic oligonucleotide
  source 1..19: mol_type = other RNA
gtaaagcaggcaagtgggc

SEQ ID NO: 5838 - RNA, 19 nt, synthetic construct
  misc_feature 1..19: note = Description of Artificial Sequence: Synthetic oligonucleotide
  source 1..19: mol_type = other RNA
ggtaaagcaggcaagtggg

SEQ ID NO: 5839 - RNA, 19 nt, synthetic construct
  misc_feature 1..19: note = Description of Artificial Sequence: Synthetic oligonucleotide
  source 1..19: mol_type = other RNA
gggtaaagcaggcaagtgg

SEQ ID NO: 5840 - RNA, 19 nt, synthetic construct
  misc_feature 1..19: note = Description of Artificial Sequence: Synthetic oligonucleotide
  source 1..19: mol_type = other RNA
tgggtaaagcaggcaagtg

SEQ ID NO: 5841 - RNA, 19 nt, synthetic construct
  misc_feature 1..19: note = Description of Artificial Sequence: Synthetic oligonucleotide
  source 1..19: mol_type = other RNA
gtgggtaaagcaggcaagt

SEQ ID NO: 5842 - RNA, 19 nt, synthetic construct
  misc_feature 1..19: note = Description of Artificial Sequence: Synthetic oligonucleotide
  source 1..19: mol_type = other RNA
tgtgggtaaagcaggcaag

SEQ ID NO: 5843 - RNA, 19 nt, synthetic construct
  misc_feature 1..19: note = Description of Artificial Sequence: Synthetic oligonucleotide
  source 1..19: mol_type = other RNA
ttgtgggtaaagcaggcaa

SEQ ID NO: 5844 - RNA, 19 nt, synthetic construct
  misc_feature 1..19: note = Description of Artificial Sequence: Synthetic oligonucleotide
  source 1..19: mol_type = other RNA
gttgtgggtaaagcaggca

SEQ ID NO: 5845 - RNA, 19 nt, synthetic construct
  misc_feature 1..19: note = Description of Artificial Sequence: Synthetic oligonucleotide
  source 1..19: mol_type = other RNA
agttgtgggtaaagcaggc

SEQ ID NO: 5846 - RNA, 19 nt, synthetic construct
  misc_feature 1..19: note = Description of Artificial Sequence: Synthetic oligonucleotide
  source 1..19: mol_type = other RNA
cagttgtgggtaaagcagg

SEQ ID NO: 5847 - RNA, 19 nt, synthetic construct
  misc_feature 1..19: note = Description of Artificial Sequence: Synthetic oligonucleotide
  source 1..19: mol_type = other RNA
gcagttgtgggtaaagcag

SEQ ID NO: 5848 - RNA, 19 nt, synthetic construct
  misc_feature 1..19: note = Description of Artificial Sequence: Synthetic oligonucleotide
  source 1..19: mol_type = other RNA
agcagttgtgggtaaagca

SEQ ID NO: 5849 - RNA, 19 nt, synthetic construct
  misc_feature 1..19: note = Description of Artificial Sequence: Synthetic oligonucleotide
  source 1..19: mol_type = other RNA
cagcagttgtgggtaaagc

SEQ ID NO: 5850 - RNA, 19 nt, synthetic construct
  misc_feature 1..19: note = Description of Artificial Sequence: Synthetic oligonucleotide
  source 1..19: mol_type = other RNA
ccagcagttgtgggtaaag

SEQ ID NO: 5851 - RNA, 19 nt, synthetic construct
  misc_feature 1..19: note = Description of Artificial Sequence: Synthetic oligonucleotide
  source 1..19: mol_type = other RNA
cccagcagttgtgggtaaa

SEQ ID NO: 5852 - RNA, 19 nt, synthetic construct
  misc_feature 1..19: note = Description of Artificial Sequence: Synthetic oligonucleotide
  source 1..19: mol_type = other RNA
acccagcagttgtgggtaa

SEQ ID NO: 5853 - RNA, 19 nt, synthetic construct
  misc_feature 1..19: note = Description of Artificial Sequence: Synthetic oligonucleotide
  source 1..19: mol_type = other RNA
gacccagcagttgtgggta

SEQ ID NO: 5854 - RNA, 19 nt, synthetic construct
  misc_feature 1..19: note = Description of Artificial Sequence: Synthetic oligonucleotide
  source 1..19: mol_type = other RNA
ggacccagcagttgtgggt

SEQ ID NO: 5855 - RNA, 19 nt, synthetic construct
  misc_feature 1..19: note = Description of Artificial Sequence: Synthetic oligonucleotide
  source 1..19: mol_type = other RNA
aggacccagcagttgtggg

SEQ ID NO: 5856 - RNA, 19 nt, synthetic construct
  misc_feature 1..19: note = Description of Artificial Sequence: Synthetic oligonucleotide
  source 1..19: mol_type = other RNA
caggacccagcagttgtgg

SEQ ID NO: 5857 - RNA, 19 nt, synthetic construct
  misc_feature 1..19: note = Description of Artificial Sequence: Synthetic oligonucleotide
  source 1..19: mol_type = other RNA
ccaggacccagcagttgtg

SEQ ID NO: 5858 - RNA, 19 nt, synthetic construct
  misc_feature 1..19: note = Description of Artificial Sequence: Synthetic oligonucleotide
  source 1..19: mol_type = other RNA
tccaggacccagcagttgt

SEQ ID NO: 5859 - RNA, 19 nt, synthetic construct
  misc_feature 1..19: note = Description of Artificial Sequence: Synthetic oligonucleotide
  source 1..19: mol_type = other RNA
ttccaggacccagcagttg

SEQ ID NO: 5860 - RNA, 19 nt, synthetic construct
  misc_feature 1..19: note = Description of Artificial Sequence: Synthetic oligonucleotide
  source 1..19: mol_type = other RNA
cttccaggacccagcagtt

SEQ ID NO: 5861 - RNA, 19 nt, synthetic construct
  misc_feature 1..19: note = Description of Artificial Sequence: Synthetic oligonucleotide
  source 1..19: mol_type = other RNA
ccttccaggacccagcagt

SEQ ID NO: 5862 - RNA, 19 nt, synthetic construct
  misc_feature 1..19: note = Description of Artificial Sequence: Synthetic oligonucleotide
  source 1..19: mol_type = other RNA
tccttccaggacccagcag

SEQ ID NO: 5863 - RNA, 19 nt, synthetic construct
  misc_feature 1..19: note = Description of Artificial Sequence: Synthetic oligonucleotide
  source 1..19: mol_type = other RNA
ttccttccaggacccagca

SEQ ID NO: 5864 - RNA, 19 nt, synthetic construct
  misc_feature 1..19: note = Description of Artificial Sequence: Synthetic oligonucleotide
  source 1..19: mol_type = other RNA
attccttccaggacccagc

SEQ ID NO: 5865 - RNA, 19 nt, synthetic construct
  misc_feature 1..19: note = Description of Artificial Sequence: Synthetic oligonucleotide
  source 1..19: mol_type = other RNA
aattccttccaggacccag

SEQ ID NO: 5866 - RNA, 19 nt, synthetic construct
  misc_feature 1..19: note = Description of Artificial Sequence: Synthetic oligonucleotide
  source 1..19: mol_type = other RNA
taattccttccaggaccca

SEQ ID NO: 5867 - RNA, 19 nt, synthetic construct
  misc_feature 1..19: note = Description of Artificial Sequence: Synthetic oligonucleotide
  source 1..19: mol_type = other RNA
ataattccttccaggaccc

SEQ ID NO: 5868 - RNA, 19 nt, synthetic construct
  misc_feature 1..19: note = Description of Artificial Sequence: Synthetic oligonucleotide
  source 1..19: mol_type = other RNA
tataattccttccaggacc

SEQ ID NO: 5869 - RNA, 19 nt, synthetic construct
  misc_feature 1..19: note = Description of Artificial Sequence: Synthetic oligonucleotide
  source 1..19: mol_type = other RNA
ttataattccttccaggac

SEQ ID NO: 5870 - RNA, 19 nt, synthetic construct
  misc_feature 1..19: note = Description of Artificial Sequence: Synthetic oligonucleotide
  source 1..19: mol_type = other RNA
attataattccttccagga

SEQ ID NO: 5871 - RNA, 19 nt, synthetic construct
  misc_feature 1..19: note = Description of Artificial Sequence: Synthetic oligonucleotide
  source 1..19: mol_type = other RNA
gattataattccttccagg

SEQ ID NO: 5872 - RNA, 19 nt, synthetic construct
  misc_feature 1..19: note = Description of Artificial Sequence: Synthetic oligonucleotide
  source 1..19: mol_type = other RNA
ggattataattccttccag

SEQ ID NO: 5873 - RNA, 19 nt, synthetic construct
  misc_feature 1..19: note = Description of Artificial Sequence: Synthetic oligonucleotide
  source 1..19: mol_type = other RNA
gggattataattccttcca

SEQ ID NO: 5874 - RNA, 19 nt, synthetic construct
  misc_feature 1..19: note = Description of Artificial Sequence: Synthetic oligonucleotide
  source 1..19: mol_type = other RNA
ggggattataattccttcc

SEQ ID NO: 5875 - RNA, 19 nt, synthetic construct
  misc_feature 1..19: note = Description of Artificial Sequence: Synthetic oligonucleotide
  source 1..19: mol_type = other RNA
tggggattataattccttc

SEQ ID NO: 5876 - RNA, 19 nt, synthetic construct
  misc_feature 1..19: note = Description of Artificial Sequence: Synthetic oligonucleotide
  source 1..19: mol_type = other RNA
ttggggattataattcctt

SEQ ID NO: 5877 - RNA, 19 nt, synthetic construct
  misc_feature 1..19: note = Description of Artificial Sequence: Synthetic oligonucleotide
  source 1..19: mol_type = other RNA
gttggggattataattcct

SEQ ID NO: 5878 - RNA, 19 nt, synthetic construct
  misc_feature 1..19: note = Description of Artificial Sequence: Synthetic oligonucleotide
  source 1..19: mol_type = other RNA
ggttggggattataattcc

SEQ ID NO: 5879 - RNA, 19 nt, synthetic construct
  misc_feature 1..19: note = Description of Artificial Sequence: Synthetic oligonucleotide
  source 1..19: mol_type = other RNA
cggttggggattataattc

SEQ ID NO: 5880 - RNA, 19 nt, synthetic construct
  misc_feature 1..19: note = Description of Artificial Sequence: Synthetic oligonucleotide
  source 1..19: mol_type = other RNA
tcggttggggattataatt

SEQ ID NO: 5881 - RNA, 19 nt, synthetic construct
  misc_feature 1..19: note = Description of Artificial Sequence: Synthetic oligonucleotide
  source 1..19: mol_type = other RNA
ctcggttggggattataat

SEQ ID NO: 5882 - RNA, 19 nt, synthetic construct
  misc_feature 1..19: note = Description of Artificial Sequence: Synthetic oligonucleotide
  source 1..19: mol_type = other RNA
actcggttggggattataa

SEQ ID NO: 5883 - RNA, 19 nt, synthetic construct
  misc_feature 1..19: note = Description of Artificial Sequence: Synthetic oligonucleotide
  source 1..19: mol_type = other RNA
tactcggttggggattata

SEQ ID NO: 5884 - RNA, 19 nt, synthetic construct
  misc_feature 1..19: note = Description of Artificial Sequence: Synthetic oligonucleotide
  source 1..19: mol_type = other RNA
atactcggttggggattat

SEQ ID NO: 5885 - RNA, 19 nt, synthetic construct
  misc_feature 1..19: note = Description of Artificial Sequence: Synthetic oligonucleotide
  source 1..19: mol_type = other RNA
catactcggttggggatta

SEQ ID NO: 5886 - RNA, 19 nt, synthetic construct
  misc_feature 1..19: note = Description of Artificial Sequence: Synthetic oligonucleotide
  source 1..19: mol_type = other RNA
gcatactcggttggggatt

SEQ ID NO: 5887 - RNA, 19 nt, synthetic construct
  misc_feature 1..19: note = Description of Artificial Sequence: Synthetic oligonucleotide
  source 1..19: mol_type = other RNA
cgcatactcggttggggat

SEQ ID NO: 5888 - RNA, 19 nt, synthetic construct
  misc_feature 1..19: note = Description of Artificial Sequence: Synthetic oligonucleotide
  source 1..19: mol_type = other RNA
gcgcatactcggttgggga

SEQ ID NO: 5889 - RNA, 19 nt, synthetic construct
  misc_feature 1..19: note = Description of Artificial Sequence: Synthetic oligonucleotide
  source 1..19: mol_type = other RNA
tgcgcatactcggttgggg

SEQ ID NO: 5890 - RNA, 19 nt, synthetic construct
  misc_feature 1..19: note = Description of Artificial Sequence: Synthetic oligonucleotide
  source 1..19: mol_type = other RNA
ttgcgcatactcggttggg

SEQ ID NO: 5891 - RNA, 19 nt, synthetic construct
  misc_feature 1..19: note = Description of Artificial Sequence: Synthetic oligonucleotide
  source 1..19: mol_type = other RNA
cttgcgcatactcggttgg

SEQ ID NO: 5892 - RNA, 19 nt, synthetic construct
  misc_feature 1..19: note = Description of Artificial Sequence: Synthetic oligonucleotide
  source 1..19: mol_type = other RNA
ccttgcgcatactcggttg

SEQ ID NO: 5893 - RNA, 19 nt, synthetic construct
  misc_feature 1..19: note = Description of Artificial Sequence: Synthetic oligonucleotide
  source 1..19: mol_type = other RNA
accttgcgcatactcggtt

SEQ ID NO: 5894 - RNA, 19 nt, synthetic construct
  misc_feature 1..19: note = Description of Artificial Sequence: Synthetic oligonucleotide
  source 1..19: mol_type = other RNA
gaccttgcgcatactcggt

SEQ ID NO: 5895 - RNA, 19 nt, synthetic construct
  misc_feature 1..19: note = Description of Artificial Sequence: Synthetic oligonucleotide
  source 1..19: mol_type = other RNA
ggaccttgcgcatactcgg

SEQ ID NO: 5896 - RNA, 19 nt, synthetic construct
  misc_feature 1..19: note = Description of Artificial Sequence: Synthetic oligonucleotide
  source 1..19: mol_type = other RNA
gggaccttgcgcatactcg

SEQ ID NO: 5897 - RNA, 19 nt, synthetic construct
  misc_feature 1..19: note = Description of Artificial Sequence: Synthetic oligonucleotide
  source 1..19: mol_type = other RNA
cgggaccttgcgcatactc

SEQ ID NO: 5898 - RNA, 19 nt, synthetic construct
  misc_feature 1..19: note = Description of Artificial Sequence: Synthetic oligonucleotide
  source 1..19: mol_type = other RNA
gcgggaccttgcgcatact

SEQ ID NO: 5899 - RNA, 19 nt, synthetic construct
  misc_feature 1..19: note = Description of Artificial Sequence: Synthetic oligonucleotide
  source 1..19: mol_type = other RNA
agcgggaccttgcgcatac

SEQ ID NO: 5900 - RNA, 19 nt, synthetic construct
  misc_feature 1..19: note = Description of Artificial Sequence: Synthetic oligonucleotide
  source 1..19: mol_type = other RNA
cagcgggaccttgcgcata

SEQ ID NO: 5901 - RNA, 19 nt, synthetic construct
  misc_feature 1..19: note = Description of Artificial Sequence: Synthetic oligonucleotide
  source 1..19: mol_type = other RNA
ccagcgggaccttgcgcat

SEQ ID NO: 5902 - RNA, 19 nt, synthetic construct
  misc_feature 1..19: note = Description of Artificial Sequence: Synthetic oligonucleotide
  source 1..19: mol_type = other RNA
gccagcgggaccttgcgca

SEQ ID NO: 5903 - RNA, 19 nt, synthetic construct
  misc_feature 1..19: note = Description of Artificial Sequence: Synthetic oligonucleotide
  source 1..19: mol_type = other RNA
ggccagcgggaccttgcgc

SEQ ID NO: 5904 - RNA, 19 nt, synthetic construct
  misc_feature 1..19: note = Description of Artificial Sequence: Synthetic oligonucleotide
  source 1..19: mol_type = other RNA
tggccagcgggaccttgcg

SEQ ID NO: 5905 - RNA, 19 nt, synthetic construct
  misc_feature 1..19: note = Description of Artificial Sequence: Synthetic oligonucleotide
  source 1..19: mol_type = other RNA
ctggccagcgggaccttgc

SEQ ID NO: 5906 - RNA, 19 nt, synthetic construct
  misc_feature 1..19: note = Description of Artificial Sequence: Synthetic oligonucleotide
  source 1..19: mol_type = other RNA
gctggccagcgggaccttg

SEQ ID NO: 5907 - RNA, 19 nt, synthetic construct
  misc_feature 1..19: note = Description of Artificial Sequence: Synthetic oligonucleotide
  source 1..19: mol_type = other RNA
agctggccagcgggacctt

SEQ ID NO: 5908 - RNA, 19 nt, synthetic construct
  misc_feature 1..19: note = Description of Artificial Sequence: Synthetic oligonucleotide
  source 1..19: mol_type = other RNA
cagctggccagcgggacct

SEQ ID NO: 5909 - RNA, 19 nt, synthetic construct
  misc_feature 1..19: note = Description of Artificial Sequence: Synthetic oligonucleotide
  source 1..19: mol_type = other RNA
acagctggccagcgggacc

SEQ ID NO: 5910 - RNA, 19 nt, synthetic construct
  misc_feature 1..19: note = Description of Artificial Sequence: Synthetic oligonucleotide
  source 1..19: mol_type = other RNA
gacagctggccagcgggac

SEQ ID NO: 5911 - RNA, 19 nt, synthetic construct
  misc_feature 1..19: note = Description of Artificial Sequence: Synthetic oligonucleotide
  source 1..19: mol_type = other RNA
agacagctggccagcggga

SEQ ID NO: 5912 - RNA, 19 nt, synthetic construct
  misc_feature 1..19: note = Description of Artificial Sequence: Synthetic oligonucleotide
  source 1..19: mol_type = other RNA
aagacagctggccagcggg

SEQ ID NO: 5913 - RNA, 19 nt, synthetic construct
  misc_feature 1..19: note = Description of Artificial Sequence: Synthetic oligonucleotide
  source 1..19: mol_type = other RNA
gaagacagctggccagcgg

SEQ ID NO: 5914 - RNA, 19 nt, synthetic construct
  misc_feature 1..19: note = Description of Artificial Sequence: Synthetic oligonucleotide
  source 1..19: mol_type = other RNA
tgaagacagctggccagcg

SEQ ID NO: 5915 - RNA, 19 nt, synthetic construct
  misc_feature 1..19: note = Description of Artificial Sequence: Synthetic oligonucleotide
  source 1..19: mol_type = other RNA
gtgaagacagctggccagc

SEQ ID NO: 5916 - RNA, 19 nt, synthetic construct
  misc_feature 1..19: note = Description of Artificial Sequence: Synthetic oligonucleotide
  source 1..19: mol_type = other RNA
cgtgaagacagctggccag

SEQ ID NO: 5917 - RNA, 19 nt, synthetic construct
  misc_feature 1..19: note = Description of Artificial Sequence: Synthetic oligonucleotide
  source 1..19: mol_type = other RNA
gcgtgaagacagctggcca

SEQ ID NO: 5918 - RNA, 19 nt, synthetic construct
  misc_feature 1..19: note = Description of Artificial Sequence: Synthetic oligonucleotide
  source 1..19: mol_type = other RNA
cgcgtgaagacagctggcc

SEQ ID NO: 5919 - RNA, 19 nt, synthetic construct
  misc_feature 1..19: note = Description of Artificial Sequence: Synthetic oligonucleotide
  source 1..19: mol_type = other RNA
acgcgtgaagacagctggc

SEQ ID NO: 5920 - RNA, 19 nt, synthetic construct
  misc_feature 1..19: note = Description of Artificial Sequence: Synthetic oligonucleotide
  source 1..19: mol_type = other RNA
cacgcgtgaagacagctgg

SEQ ID NO: 5921 - RNA, 19 nt, synthetic construct
  misc_feature 1..19: note = Description of Artificial Sequence: Synthetic oligonucleotide
  source 1..19: mol_type = other RNA
acacgcgtgaagacagctg

SEQ ID NO: 5922 - RNA, 19 nt, synthetic construct
  misc_feature 1..19: note = Description of Artificial Sequence: Synthetic oligonucleotide
  source 1..19: mol_type = other RNA
gacacgcgtgaagacagct

SEQ ID NO: 5923 - RNA, 19 nt, synthetic construct
  misc_feature 1..19: note = Description of Artificial Sequence: Synthetic oligonucleotide
  source 1..19: mol_type = other RNA
agacacgcgtgaagacagc

SEQ ID NO: 5924 - RNA, 19 nt, synthetic construct
  misc_feature 1..19: note = Description of Artificial Sequence: Synthetic oligonucleotide
  source 1..19: mol_type = other RNA
gagacacgcgtgaagacag

SEQ ID NO: 5925 - RNA, 19 nt, synthetic construct
  misc_feature 1..19: note = Description of Artificial Sequence: Synthetic oligonucleotide
  source 1..19: mol_type = other RNA
agagacacgcgtgaagaca

SEQ ID NO: 5926 - RNA, 19 nt, synthetic construct
  misc_feature 1..19: note = Description of Artificial Sequence: Synthetic oligonucleotide
  source 1..19: mol_type = other RNA
cagagacacgcgtgaagac

SEQ ID NO: 5927 - RNA, 19 nt, synthetic construct
  misc_feature 1..19: note = Description of Artificial Sequence: Synthetic oligonucleotide
  source 1..19: mol_type = other RNA
acagagacacgcgtgaaga

SEQ ID NO: 5928 - RNA, 19 nt, synthetic construct
  misc_feature 1..19: note = Description of Artificial Sequence: Synthetic oligonucleotide
  source 1..19: mol_type = other RNA
cacagagacacgcgtgaag

SEQ ID NO: 5929 - RNA, 19 nt, synthetic construct
  misc_feature 1..19: note = Description of Artificial Sequence: Synthetic oligonucleotide
  source 1..19: mol_type = other RNA
acacagagacacgcgtgaa

SEQ ID NO: 5930 - RNA, 19 nt, synthetic construct
  misc_feature 1..19: note = Description of Artificial Sequence: Synthetic oligonucleotide
  source 1..19: mol_type = other RNA
aacacagagacacgcgtga

SEQ ID NO: 5931 - RNA, 19 nt, synthetic construct
  misc_feature 1..19: note = Description of Artificial Sequence: Synthetic oligonucleotide
  source 1..19: mol_type = other RNA
aaacacagagacacgcgtg

SEQ ID NO: 5932 - RNA, 19 nt, synthetic construct
  misc_feature 1..19: note = Description of Artificial Sequence: Synthetic oligonucleotide
  source 1..19: mol_type = other RNA
caaacacagagacacgcgt

SEQ ID NO: 5933 - RNA, 19 nt, synthetic construct
  misc_feature 1..19: note = Description of Artificial Sequence: Synthetic oligonucleotide
  source 1..19: mol_type = other RNA
acaaacacagagacacgcg

SEQ ID NO: 5934 - RNA, 19 nt, synthetic construct
  misc_feature 1..19: note = Description of Artificial Sequence: Synthetic oligonucleotide
  source 1..19: mol_type = other RNA
cacaaacacagagacacgc

SEQ ID NO: 5935 - RNA, 19 nt, synthetic construct
  misc_feature 1..19: note = Description of Artificial Sequence: Synthetic oligonucleotide
  source 1..19: mol_type = other RNA
ccacaaacacagagacacg

SEQ ID NO: 5936 - RNA, 19 nt, synthetic construct
  misc_feature 1..19: note = Description of Artificial Sequence: Synthetic oligonucleotide
  source 1..19: mol_type = other RNA
tccacaaacacagagacac

SEQ ID NO: 5937 - RNA, 19 nt, synthetic construct
  misc_feature 1..19: note = Description of Artificial Sequence: Synthetic oligonucleotide
  source 1..19: mol_type = other RNA
gtccacaaacacagagaca

SEQ ID NO: 5938 - RNA, 19 nt, synthetic construct
  misc_feature 1..19: note = Description of Artificial Sequence: Synthetic oligonucleotide
  source 1..19: mol_type = other RNA
agtccacaaacacagagac

SEQ ID NO: 5939 - RNA, 19 nt, synthetic construct
  misc_feature 1..19: note = Description of Artificial Sequence: Synthetic oligonucleotide
  source 1..19: mol_type = other RNA
cagtccacaaacacagaga

SEQ ID NO: 5940 - RNA, 19 nt, synthetic construct
  misc_feature 1..19: note = Description of Artificial Sequence: Synthetic oligonucleotide
  source 1..19: mol_type = other RNA
ccagtccacaaacacagag

SEQ ID NO: 5941 - RNA, 19 nt, synthetic construct
  misc_feature 1..19: note = Description of Artificial Sequence: Synthetic oligonucleotide
  source 1..19: mol_type = other RNA
tccagtccacaaacacaga

SEQ ID NO: 5942 - RNA, 19 nt, synthetic construct
  misc_feature 1..19: note = Description of Artificial Sequence: Synthetic oligonucleotide
  source 1..19: mol_type = other RNA
atccagtccacaaacacag

SEQ ID NO: 5943 - RNA, 19 nt, synthetic construct
  misc_feature 1..19: note = Description of Artificial Sequence: Synthetic oligonucleotide
  source 1..19: mol_type = other RNA
aatccagtccacaaacaca

SEQ ID NO: 5944 - RNA, 19 nt, synthetic construct
  misc_feature 1..19: note = Description of Artificial Sequence: Synthetic oligonucleotide
  source 1..19: mol_type = other RNA
gaatccagtccacaaacac

SEQ ID NO: 5945 - RNA, 19 nt, synthetic construct
  misc_feature 1..19: note = Description of Artificial Sequence: Synthetic oligonucleotide
  source 1..19: mol_type = other RNA
tgaatccagtccacaaaca

SEQ ID NO: 5946 - RNA, 19 nt, synthetic construct
  misc_feature 1..19: note = Description of Artificial Sequence: Synthetic oligonucleotide
  source 1..19: mol_type = other RNA
gtgaatccagtccacaaac

SEQ ID NO: 5947 - RNA, 19 nt, synthetic construct
  misc_feature 1..19: note = Description of Artificial Sequence: Synthetic oligonucleotide
  source 1..19: mol_type = other RNA
tgtgaatccagtccacaaa

SEQ ID NO: 5948 - RNA, 19 nt, synthetic construct
  misc_feature 1..19: note = Description of Artificial Sequence: Synthetic oligonucleotide
  source 1..19: mol_type = other RNA
ttgtgaatccagtccacaa

SEQ ID NO: 5949 - RNA, 19 nt, synthetic construct
  misc_feature 1..19: note = Description of Artificial Sequence: Synthetic oligonucleotide
  source 1..19: mol_type = other RNA
cttgtgaatccagtccaca

SEQ ID NO: 5950 - RNA, 19 nt, synthetic construct
  misc_feature 1..19: note = Description of Artificial Sequence: Synthetic oligonucleotide
  source 1..19: mol_type = other RNA
ccttgtgaatccagtccac

SEQ ID NO: 5951 - RNA, 19 nt, synthetic construct
  misc_feature 1..19: note = Description of Artificial Sequence: Synthetic oligonucleotide
  source 1..19: mol_type = other RNA
accttgtgaatccagtcca

SEQ ID NO: 5952 - RNA, 19 nt, synthetic construct
  misc_feature 1..19: note = Description of Artificial Sequence: Synthetic oligonucleotide
  source 1..19: mol_type = other RNA
gaccttgtgaatccagtcc

SEQ ID NO: 5953 - RNA, 19 nt, synthetic construct
  misc_feature 1..19: note = Description of Artificial Sequence: Synthetic oligonucleotide
  source 1..19: mol_type = other RNA
tgaccttgtgaatccagtc

SEQ ID NO: 5954 - RNA, 19 nt, synthetic construct
  misc_feature 1..19: note = Description of Artificial Sequence: Synthetic oligonucleotide
  source 1..19: mol_type = other RNA
atgaccttgtgaatccagt

SEQ ID NO: 5955 - RNA, 19 nt, synthetic construct
  misc_feature 1..19: note = Description of Artificial Sequence: Synthetic oligonucleotide
  source 1..19: mol_type = other RNA
catgaccttgtgaatccag

SEQ ID NO: 5956 - RNA, 19 nt, synthetic construct
  misc_feature 1..19: note = Description of Artificial Sequence: Synthetic oligonucleotide
  source 1..19: mol_type = other RNA
tcatgaccttgtgaatcca

SEQ ID NO: 5957 - RNA, 19 nt, synthetic construct
  misc_feature 1..19: note = Description of Artificial Sequence: Synthetic oligonucleotide
  source 1..19: mol_type = other RNA
ctcatgaccttgtgaatcc

SEQ ID NO: 5958 - RNA, 19 nt, synthetic construct
  misc_feature 1..19: note = Description of Artificial Sequence: Synthetic oligonucleotide
  source 1..19: mol_type = other RNA
tctcatgaccttgtgaatc

SEQ ID NO: 5959 - RNA, 19 nt, synthetic construct
  misc_feature 1..19: note = Description of Artificial Sequence: Synthetic oligonucleotide
  source 1..19: mol_type = other RNA
gtctcatgaccttgtgaat

SEQ ID NO: 5960 - RNA, 19 nt, synthetic construct
  misc_feature 1..19: note = Description of Artificial Sequence: Synthetic oligonucleotide
  source 1..19: mol_type = other RNA
agtctcatgaccttgtgaa

SEQ ID NO: 5961 - RNA, 19 nt, synthetic construct
  misc_feature 1..19: note = Description of Artificial Sequence: Synthetic oligonucleotide
  source 1..19: mol_type = other RNA
cagtctcatgaccttgtga

SEQ ID NO: 5962 - RNA, 19 nt, synthetic construct
  misc_feature 1..19: note = Description of Artificial Sequence: Synthetic oligonucleotide
  source 1..19: mol_type = other RNA
ccagtctcatgaccttgtg

SEQ ID NO: 5963 - RNA, 19 nt, synthetic construct
  misc_feature 1..19: note = Description of Artificial Sequence: Synthetic oligonucleotide
  source 1..19: mol_type = other RNA
cccagtctcatgaccttgt

SEQ ID NO: 5964 - RNA, 19 nt, synthetic construct
  misc_feature 1..19: note = Description of Artificial Sequence: Synthetic oligonucleotide
  source 1..19: mol_type = other RNA
acccagtctcatgaccttg

SEQ ID NO: 5965 - RNA, 19 nt, synthetic construct
  misc_feature 1..19: note = Description of Artificial Sequence: Synthetic oligonucleotide
  source 1..19: mol_type = other RNA
aacccagtctcatgacctt

SEQ ID NO: 5966 - RNA, 19 nt, synthetic construct
  misc_feature 1..19: note = Description of Artificial Sequence: Synthetic oligonucleotide
  source 1..19: mol_type = other RNA
taacccagtctcatgacct

SEQ ID NO: 5967 - RNA, 19 nt, synthetic construct
  misc_feature 1..19: note = Description of Artificial Sequence: Synthetic oligonucleotide
  source 1..19: mol_type = other RNA
ctaacccagtctcatgacc

SEQ ID NO: 5968 - RNA, 19 nt, synthetic construct
  misc_feature 1..19: note = Description of Artificial Sequence: Synthetic oligonucleotide
  source 1..19: mol_type = other RNA
cctaacccagtctcatgac

SEQ ID NO: 5969 - RNA, 19 nt, synthetic construct
  misc_feature 1..19: note = Description of Artificial Sequence: Synthetic oligonucleotide
  source 1..19: mol_type = other RNA
gcctaacccagtctcatga

SEQ ID NO: 5970 - RNA, 19 nt, synthetic construct
  misc_feature 1..19: note = Description of Artificial Sequence: Synthetic oligonucleotide
  source 1..19: mol_type = other RNA
ggcctaacccagtctcatg

SEQ ID NO: 5971 - RNA, 19 nt, synthetic construct
  misc_feature 1..19: note = Description of Artificial Sequence: Synthetic oligonucleotide
  source 1..19: mol_type = other RNA
gggcctaacccagtctcat

SEQ ID NO: 5972 - RNA, 19 nt, synthetic construct
  misc_feature 1..19: note = Description of Artificial Sequence: Synthetic oligonucleotide
  source 1..19: mol_type = other RNA
tgggcctaacccagtctca

SEQ ID NO: 5973 - RNA, 19 nt, synthetic construct
  misc_feature 1..19: note = Description of Artificial Sequence: Synthetic oligonucleotide
  source 1..19: mol_type = other RNA
ctgggcctaacccagtctc

SEQ ID NO: 5974 - RNA, 19 nt, synthetic construct
  misc_feature 1..19: note = Description of Artificial Sequence: Synthetic oligonucleotide
  source 1..19: mol_type = other RNA
gctgggcctaacccagtct

SEQ ID NO: 5975 - RNA, 19 nt, synthetic construct
  misc_feature 1..19: note = Description of Artificial Sequence: Synthetic oligonucleotide
  source 1..19: mol_type = other RNA
ggctgggcctaacccagtc

SEQ ID NO: 5976 - RNA, 19 nt, synthetic construct
  misc_feature 1..19: note = Description of Artificial Sequence: Synthetic oligonucleotide
  source 1..19: mol_type = other RNA
aggctgggcctaacccagt

SEQ ID NO: 5977 - RNA, 19 nt, synthetic construct
  misc_feature 1..19: note = Description of Artificial Sequence: Synthetic oligonucleotide
  source 1..19: mol_type = other RNA
aaggctgggcctaacccag

SEQ ID NO: 5978 - RNA, 19 nt, synthetic construct
  misc_feature 1..19: note = Description of Artificial Sequence: Synthetic oligonucleotide
  source 1..19: mol_type = other RNA
caaggctgggcctaaccca

SEQ ID NO: 5979 - RNA, 19 nt, synthetic construct
  misc_feature 1..19: note = Description of Artificial Sequence: Synthetic oligonucleotide
  source 1..19: mol_type = other RNA
tcaaggctgggcctaaccc

SEQ ID NO: 5980 - RNA, 19 nt, synthetic construct
  misc_feature 1..19: note = Description of Artificial Sequence: Synthetic oligonucleotide
  source 1..19: mol_type = other RNA
atcaaggctgggcctaacc

SEQ ID NO: 5981 - RNA, 19 nt, synthetic construct
  misc_feature 1..19: note = Description of Artificial Sequence: Synthetic oligonucleotide
  source 1..19: mol_type = other RNA
catcaaggctgggcctaac

SEQ ID NO: 5982 - RNA, 19 nt, synthetic construct
  misc_feature 1..19: note = Description of Artificial Sequence: Synthetic oligonucleotide
  source 1..19: mol_type = other RNA
gcatcaaggctgggcctaa

SEQ ID NO: 5983 - RNA, 19 nt, synthetic construct
  misc_feature 1..19: note = Description of Artificial Sequence: Synthetic oligonucleotide
  source 1..19: mol_type = other RNA
ggcatcaaggctgggccta

SEQ ID NO: 5984 - RNA, 19 nt, synthetic construct
  misc_feature 1..19: note = Description of Artificial Sequence: Synthetic oligonucleotide
  source 1..19: mol_type = other RNA
tggcatcaaggctgggcct

SEQ ID NO: 5985 - RNA, 19 nt, synthetic construct
  misc_feature 1..19: note = Description of Artificial Sequence: Synthetic oligonucleotide
  source 1..19: mol_type = other RNA
atggcatcaaggctgggcc

SEQ ID NO: 5986 - RNA, 19 nt, synthetic construct
  misc_feature 1..19: note = Description of Artificial Sequence: Synthetic oligonucleotide
  source 1..19: mol_type = other RNA
tatggcatcaaggctgggc

SEQ ID NO: 5987 - RNA, 19 nt, synthetic construct
  misc_feature 1..19: note = Description of Artificial Sequence: Synthetic oligonucleotide
  source 1..19: mol_type = other RNA
atatggcatcaaggctggg

SEQ ID NO: 5988 - RNA, 19 nt, synthetic construct
  misc_feature 1..19: note = Description of Artificial Sequence: Synthetic oligonucleotide
  source 1..19: mol_type = other RNA
catatggcatcaaggctgg

SEQ ID NO: 5989 - RNA, 19 nt, synthetic construct
  misc_feature 1..19: note = Description of Artificial Sequence: Synthetic oligonucleotide
  source 1..19: mol_type = other RNA
gcatatggcatcaaggctg

SEQ ID NO: 5990 - RNA, 19 nt, synthetic construct
  misc_feature 1..19: note = Description of Artificial Sequence: Synthetic oligonucleotide
  source 1..19: mol_type = other RNA
ggcatatggcatcaaggct

SEQ ID NO: 5991 - RNA, 19 nt, synthetic construct
  misc_feature 1..19: note = Description of Artificial Sequence: Synthetic oligonucleotide
  source 1..19: mol_type = other RNA
aggcatatggcatcaaggc

SEQ ID NO: 5992 - RNA, 19 nt, synthetic construct
  misc_feature 1..19: note = Description of Artificial Sequence: Synthetic oligonucleotide
  source 1..19: mol_type = other RNA
aaggcatatggcatcaagg

SEQ ID NO: 5993 - RNA, 19 nt, synthetic construct
  misc_feature 1..19: note = Description of Artificial Sequence: Synthetic oligonucleotide
  source 1..19: mol_type = other RNA
caaggcatatggcatcaag

SEQ ID NO: 5994 - RNA, 19 nt, synthetic construct
  misc_feature 1..19: note = Description of Artificial Sequence: Synthetic oligonucleotide
  source 1..19: mol_type = other RNA
ccaaggcatatggcatcaa

SEQ ID NO: 5995 - RNA, 19 nt, synthetic construct
  misc_feature 1..19: note = Description of Artificial Sequence: Synthetic oligonucleotide
  source 1..19: mol_type = other RNA
cccaaggcatatggcatca

SEQ ID NO: 5996 - RNA, 19 nt, synthetic construct
  misc_feature 1..19: note = Description of Artificial Sequence: Synthetic oligonucleotide
  source 1..19: mol_type = other RNA
ccccaaggcatatggcatc

SEQ ID NO: 5997 - RNA, 19 nt, synthetic construct
  misc_feature 1..19: note = Description of Artificial Sequence: Synthetic oligonucleotide
  source 1..19: mol_type = other RNA
tccccaaggcatatggcat

SEQ ID NO: 5998 - RNA, 19 nt, synthetic construct
  misc_feature 1..19: note = Description of Artificial Sequence: Synthetic oligonucleotide
  source 1..19: mol_type = other RNA
ctccccaaggcatatggca

SEQ ID NO: 5999 - RNA, 19 nt, synthetic construct
  misc_feature 1..19: note = Description of Artificial Sequence: Synthetic oligonucleotide
  source 1..19: mol_type = other RNA
cctccccaaggcatatggc

SEQ ID NO: 6000 - RNA, 19 nt, synthetic construct
  misc_feature 1..19: note = Description of Artificial Sequence: Synthetic oligonucleotide
  source 1..19: mol_type = other RNA
tcctccccaaggcatatgg

SEQ ID NO: 6001 - RNA, 19 nt, synthetic construct
  misc_feature 1..19: note = Description of Artificial Sequence: Synthetic oligonucleotide
  source 1..19: mol_type = other RNA
gtcctccccaaggcatatg

SEQ ID NO: 6002 - RNA, 19 nt, synthetic construct
  misc_feature 1..19: note = Description of Artificial Sequence: Synthetic oligonucleotide
  source 1..19: mol_type = other RNA
tgtcctccccaaggcatat

SEQ ID NO: 6003 - RNA, 19 nt, synthetic construct
  misc_feature 1..19: note = Description of Artificial Sequence: Synthetic oligonucleotide
  source 1..19: mol_type = other RNA
ttgtcctccccaaggcata

SEQ ID NO: 6004 - RNA, 19 nt, synthetic construct
  misc_feature 1..19: note = Description of Artificial Sequence: Synthetic oligonucleotide
  source 1..19: mol_type = other RNA
tttgtcctccccaaggcat

SEQ ID NO: 6005 - RNA, 19 nt, synthetic construct
  misc_feature 1..19: note = Description of Artificial Sequence: Synthetic oligonucleotide
  source 1..19: mol_type = other RNA
ttttgtcctccccaaggca

SEQ ID NO: 6006 - RNA, 19 nt, synthetic construct
  misc_feature 1..19: note = Description of Artificial Sequence: Synthetic oligonucleotide
  source 1..19: mol_type = other RNA
gttttgtcctccccaaggc

SEQ ID NO: 6007 - RNA, 19 nt, synthetic construct
  misc_feature 1..19: note = Description of Artificial Sequence: Synthetic oligonucleotide
  source 1..19: mol_type = other RNA
agttttgtcctccccaagg

SEQ ID NO: 6008 - RNA, 19 nt, synthetic construct
  misc_feature 1..19: note = Description of Artificial Sequence: Synthetic oligonucleotide
  source 1..19: mol_type = other RNA
aagttttgtcctccccaag

SEQ ID NO: 6009 - RNA, 19 nt, synthetic construct
  misc_feature 1..19: note = Description of Artificial Sequence: Synthetic oligonucleotide
  source 1..19: mol_type = other RNA
gaagttttgtcctccccaa

SEQ ID NO: 6010 - RNA, 19 nt, synthetic construct
  misc_feature 1..19: note = Description of Artificial Sequence: Synthetic oligonucleotide
  source 1..19: mol_type = other RNA
agaagttttgtcctcccca

SEQ ID NO: 6011 - RNA, 19 nt, synthetic construct
  misc_feature 1..19: note = Description of Artificial Sequence: Synthetic oligonucleotide
  source 1..19: mol_type = other RNA
aagaagttttgtcctcccc

SEQ ID NO: 6012 - RNA, 19 nt, synthetic construct
  misc_feature 1..19: note = Description of Artificial Sequence: Synthetic oligonucleotide
  source 1..19: mol_type = other RNA
caagaagttttgtcctccc

SEQ ID NO: 6013 - RNA, 19 nt, synthetic construct
  misc_feature 1..19: note = Description of Artificial Sequence: Synthetic oligonucleotide
  source 1..19: mol_type = other RNA
acaagaagttttgtcctcc

SEQ ID NO: 6014 - RNA, 19 nt, synthetic construct
  misc_feature 1..19: note = Description of Artificial Sequence: Synthetic oligonucleotide
  source 1..19: mol_type = other RNA
gacaagaagttttgtcctc

SEQ ID NO: 6015 - RNA, 19 nt, synthetic construct
  misc_feature 1..19: note = Description of Artificial Sequence: Synthetic oligonucleotide
  source 1..19: mol_type = other RNA
tgacaagaagttttgtcct

SEQ ID NO: 6016 - RNA, 19 nt, synthetic construct
  misc_feature 1..19: note = Description of Artificial Sequence: Synthetic oligonucleotide
  source 1..19: mol_type = other RNA
ctgacaagaagttttgtcc

SEQ ID NO: 6017 - RNA, 19 nt, synthetic construct
  misc_feature 1..19: note = Description of Artificial Sequence: Synthetic oligonucleotide
  source 1..19: mol_type = other RNA
tctgacaagaagttttgtc

SEQ ID NO: 6018 - RNA, 19 nt, synthetic construct
  misc_feature 1..19: note = Description of Artificial Sequence: Synthetic oligonucleotide
  source 1..19: mol_type = other RNA
gtctgacaagaagttttgt

SEQ ID NO: 6019 - RNA, 19 nt, synthetic construct
  misc_feature 1..19: note = Description of Artificial Sequence: Synthetic oligonucleotide
  source 1..19: mol_type = other RNA
tgtctgacaagaagttttg

SEQ ID NO: 6020 - RNA, 19 nt, synthetic construct
  misc_feature 1..19: note = Description of Artificial Sequence: Synthetic oligonucleotide
  source 1..19: mol_type = other RNA
atgtctgacaagaagtttt

SEQ ID NO: 6021 - RNA, 19 nt, synthetic construct
  misc_feature 1..19: note = Description of Artificial Sequence: Synthetic oligonucleotide
  source 1..19: mol_type = other RNA
tatgtctgacaagaagttt

SEQ ID NO: 6022 - RNA, 19 nt, synthetic construct
  misc_feature 1..19: note = Description of Artificial Sequence: Synthetic oligonucleotide
  source 1..19: mol_type = other RNA
ttatgtctgacaagaagtt

SEQ ID NO: 6023 - RNA, 19 nt, synthetic construct
  misc_feature 1..19: note = Description of Artificial Sequence: Synthetic oligonucleotide
  source 1..19: mol_type = other RNA
tttatgtctgacaagaagt

SEQ ID NO: 6024 - RNA, 19 nt, synthetic construct
  misc_feature 1..19: note = Description of Artificial Sequence: Synthetic oligonucleotide
  source 1..19: mol_type = other RNA
ctttatgtctgacaagaag

SEQ ID NO: 6025 - RNA, 19 nt, synthetic construct
  misc_feature 1..19: note = Description of Artificial Sequence: Synthetic oligonucleotide
  source 1..19: mol_type = other RNA
gctttatgtctgacaagaa

SEQ ID NO: 6026 - RNA, 19 nt, synthetic construct
  misc_feature 1..19: note = Description of Artificial Sequence: Synthetic oligonucleotide
  source 1..19: mol_type = other RNA
ggctttatgtctgacaaga

SEQ ID NO: 6027 - RNA, 19 nt, synthetic construct
  misc_feature 1..19: note = Description of Artificial Sequence: Synthetic oligonucleotide
  source 1..19: mol_type = other RNA
tggctttatgtctgacaag

SEQ ID NO: 6028 - RNA, 19 nt, synthetic construct
  misc_feature 1..19: note = Description of Artificial Sequence: Synthetic oligonucleotide
  source 1..19: mol_type = other RNA
atggctttatgtctgacaa

SEQ ID NO: 6029 - RNA, 19 nt, synthetic construct
  misc_feature 1..19: note = Description of Artificial Sequence: Synthetic oligonucleotide
  source 1..19: mol_type = other RNA
catggctttatgtctgaca

SEQ ID NO: 6030 - RNA, 19 nt, synthetic construct
  misc_feature 1..19: note = Description of Artificial Sequence: Synthetic oligonucleotide
  source 1..19: mol_type = other RNA
acatggctttatgtctgac

SEQ ID NO: 6031 - RNA, 19 nt, synthetic construct
  misc_feature 1..19: note = Description of Artificial Sequence: Synthetic oligonucleotide
  source 1..19: mol_type = other RNA
aacatggctttatgtctga

SEQ ID NO: 6032 - RNA, 19 nt, synthetic construct
  misc_feature 1..19: note = Description of Artificial Sequence: Synthetic oligonucleotide
  source 1..19: mol_type = other RNA
aaacatggctttatgtctg

SEQ ID NO: 6033 - RNA, 19 nt, synthetic construct
  misc_feature 1..19: note = Description of Artificial Sequence: Synthetic oligonucleotide
  source 1..19: mol_type = other RNA
gaaacatggctttatgtct

SEQ ID NO: 6034 - RNA, 19 nt, synthetic construct
  misc_feature 1..19: note = Description of Artificial Sequence: Synthetic oligonucleotide
  source 1..19: mol_type = other RNA
ggaaacatggctttatgtc

SEQ ID NO: 6035 - RNA, 19 nt, synthetic construct
  misc_feature 1..19: note = Description of Artificial Sequence: Synthetic oligonucleotide
  source 1..19: mol_type = other RNA
aggaaacatggctttatgt

SEQ ID NO: 6036 - RNA, 19 nt, synthetic construct
  misc_feature 1..19: note = Description of Artificial Sequence: Synthetic oligonucleotide
  source 1..19: mol_type = other RNA
gaggaaacatggctttatg

SEQ ID NO: 6037 - RNA, 19 nt, synthetic construct
  misc_feature 1..19: note = Description of Artificial Sequence: Synthetic oligonucleotide
  source 1..19: mol_type = other RNA
agaggaaacatggctttat

SEQ ID NO: 6038 - RNA, 19 nt, synthetic construct
  misc_feature 1..19: note = Description of Artificial Sequence: Synthetic oligonucleotide
  source 1..19: mol_type = other RNA
aagaggaaacatggcttta

SEQ ID NO: 6039 - RNA, 19 nt, synthetic construct
  misc_feature 1..19: note = Description of Artificial Sequence: Synthetic oligonucleotide
  source 1..19: mol_type = other RNA
aaagaggaaacatggcttt

SEQ ID NO: 6040 - RNA, 19 nt, synthetic construct
  misc_feature 1..19: note = Description of Artificial Sequence: Synthetic oligonucleotide
  source 1..19: mol_type = other RNA
taaagaggaaacatggctt

SEQ ID NO: 6041 - RNA, 19 nt, synthetic construct
  misc_feature 1..19: note = Description of Artificial Sequence: Synthetic oligonucleotide
  source 1..19: mol_type = other RNA
ataaagaggaaacatggct

SEQ ID NO: 6042 - RNA, 19 nt, synthetic construct
  misc_feature 1..19: note = Description of Artificial Sequence: Synthetic oligonucleotide
  source 1..19: mol_type = other RNA
cataaagaggaaacatggc

SEQ ID NO: 6043 - RNA, 19 nt, synthetic construct
  misc_feature 1..19: note = Description of Artificial Sequence: Synthetic oligonucleotide
  source 1..19: mol_type = other RNA
gcataaagaggaaacatgg

SEQ ID NO: 6044 - RNA, 19 nt, synthetic construct
  misc_feature 1..19: note = Description of Artificial Sequence: Synthetic oligonucleotide
  source 1..19: mol_type = other RNA
ggcataaagaggaaacatg

SEQ ID NO: 6045 - RNA, 19 nt, synthetic construct
  misc_feature 1..19: note = Description of Artificial Sequence: Synthetic oligonucleotide
  source 1..19: mol_type = other RNA
aggcataaagaggaaacat

SEQ ID NO: 6046 - RNA, 19 nt, synthetic construct
  misc_feature 1..19: note = Description of Artificial Sequence: Synthetic oligonucleotide
  source 1..19: mol_type = other RNA
caggcataaagaggaaaca

SEQ ID NO: 6047 - RNA, 19 nt, synthetic construct
  misc_feature 1..19: note = Description of Artificial Sequence: Synthetic oligonucleotide
  source 1..19: mol_type = other RNA
acaggcataaagaggaaac

SEQ ID NO: 6048 - RNA, 19 nt, synthetic construct
  misc_feature 1..19: note = Description of Artificial Sequence: Synthetic oligonucleotide
  source 1..19: mol_type = other RNA
tacaggcataaagaggaaa

SEQ ID NO: 6049 - RNA, 21 nt, synthetic construct
  misc_feature 1..21: note = Description of Artificial Sequence: Synthetic oligonucleotide
  source 1..21: mol_type = other RNA
agctggggcaagtaatttatt

SEQ ID NO: 6050 - RNA, 21 nt, synthetic construct
  misc_feature 1..21: note = Description of Artificial Sequence: Synthetic oligonucleotide
  source 1..21: mol_type = other RNA
aaaagtttaatgtcacccatt

SEQ ID NO: 6051 - RNA, 21 nt, synthetic construct
  misc_feature 1..21: note = Description of Artificial Sequence: Synthetic oligonucleotide
  source 1..21: mol_type = other RNA
ttaatgtcacccaggggcatt

SEQ ID NO: 6052 - RNA, 21 nt, synthetic construct
  misc_feature 1..21: note = Description of Artificial Sequence: Synthetic oligonucleotide
  source 1..21: mol_type = other RNA
tcaagtgtccccaccaaaatt

SEQ ID NO: 6053 - RNA, 21 nt, synthetic construct
  misc_feature 1..21: note = Description of Artificial Sequence: Synthetic oligonucleotide
  source 1..21: mol_type = other RNA
ccaccaaaccttcctaacatt

SEQ ID NO: 6054 - RNA, 21 nt, synthetic construct
  misc_feature 1..21: note = Description of Artificial Sequence: Synthetic oligonucleotide
  source 1..21: mol_type = other RNA
caccaaaccttcctaacaatt

SEQ ID NO: 6055 - RNA, 21 nt, synthetic construct
  misc_feature 1..21: note = Description of Artificial Sequence: Synthetic oligonucleotide
  source 1..21: mol_type = other RNA
cccttgcaactgacctatatt

SEQ ID NO: 6056 - RNA, 21 nt, synthetic construct
  misc_feature 1..21: note = Description of Artificial Sequence: Synthetic oligonucleotide
  source 1..21: mol_type = other RNA
ttgcaactgacctatgggatt

SEQ ID NO: 6057 - RNA, 21 nt, synthetic construct
  misc_feature 1..21: note = Description of Artificial Sequence: Synthetic oligonucleotide
  source 1..21: mol_type = other RNA
tgcaactgacctatgggaatt

SEQ ID NO: 6058 - RNA, 21 nt, synthetic construct
  misc_feature 1..21: note = Description of Artificial Sequence: Synthetic oligonucleotide
  source 1..21: mol_type = other RNA
aatcccgtagggacaggtatt

SEQ ID NO: 6059 - RNA, 21 nt, synthetic construct
  misc_feature 1..21: note = Description of Artificial Sequence: Synthetic oligonucleotide
  source 1..21: mol_type = other RNA
aacaatggggttgggtacatt

SEQ ID NO: 6060 - RNA, 21 nt, synthetic construct
  misc_feature 1..21: note = Description of Artificial Sequence: Synthetic oligonucleotide
  source 1..21: mol_type = other RNA
cgacaactattgccggaaatt

SEQ ID NO: 6061 - RNA, 21 nt, synthetic construct
  misc_feature 1..21: note = Description of Artificial Sequence: Synthetic oligonucleotide
  source 1..21: mol_type = other RNA
gacaactattgccggaatatt

SEQ ID NO: 6062 - RNA, 21 nt, synthetic construct
  misc_feature 1..21: note = Description of Artificial Sequence: Synthetic oligonucleotide
  source 1..21: mol_type = other RNA
tacactacggatccgcagatt

SEQ ID NO: 6063 - RNA, 21 nt, synthetic construct
  misc_feature 1..21: note = Description of Artificial Sequence: Synthetic oligonucleotide
  source 1..21: mol_type = other RNA
atcgagcgagagttctgtatt

SEQ ID NO: 6064 - RNA, 21 nt, synthetic construct
  misc_feature 1..21: note = Description of Artificial Sequence: Synthetic oligonucleotide
  source 1..21: mol_type = other RNA
caagccgcagttcacgttatt

SEQ ID NO: 6065 - RNA, 21 nt, synthetic construct
  misc_feature 1..21: note = Description of Artificial Sequence: Synthetic oligonucleotide
  source 1..21: mol_type = other RNA
aagccgcagttcacgtttatt

SEQ ID NO: 6066 - RNA, 21 nt, synthetic construct
  misc_feature 1..21: note = Description of Artificial Sequence: Synthetic oligonucleotide
  source 1..21: mol_type = other RNA
agccgcagttcacgtttaatt

SEQ ID NO: 6067 - RNA, 21 nt, synthetic construct
  misc_feature 1..21: note = Description of Artificial Sequence: Synthetic oligonucleotide
  source 1..21: mol_type = other RNA
gacagtcagcttgcggaaatt

SEQ ID NO: 6068 - RNA, 21 nt, synthetic construct
  misc_feature 1..21: note = Description of Artificial Sequence: Synthetic oligonucleotide
  source 1..21: mol_type = other RNA
acagtcagcttgcggaatatt

SEQ ID NO: 6069 - RNA, 21 nt, synthetic construct
  misc_feature 1..21: note = Description of Artificial Sequence: Synthetic oligonucleotide
  source 1..21: mol_type = other RNA
cgggctatgaggtatggtatt

SEQ ID NO: 6070 - RNA, 21 nt, synthetic construct
  misc_feature 1..21: note = Description of Artificial Sequence: Synthetic oligonucleotide
  source 1..21: mol_type = other RNA
gggctatgaggtatggttatt

SEQ ID NO: 6071 - RNA, 21 nt, synthetic construct
  misc_feature 1..21: note = Description of Artificial Sequence: Synthetic oligonucleotide
  source 1..21: mol_type = other RNA
cctgaatggtatgtggtgatt

SEQ ID NO: 6072 - RNA, 21 nt, synthetic construct
  misc_feature 1..21: note = Description of Artificial Sequence: Synthetic oligonucleotide
  source 1..21: mol_type = other RNA
gtaatgacacagtcctaaatt

SEQ ID NO: 6073 - RNA, 21 nt, synthetic construct
  misc_feature 1..21: note = Description of Artificial Sequence: Synthetic oligonucleotide
  source 1..21: mol_type = other RNA
taatgacacagtcctaaaatt

SEQ ID NO: 6074 - RNA, 21 nt, synthetic construct
  misc_feature 1..21: note = Description of Artificial Sequence: Synthetic oligonucleotide
  source 1..21: mol_type = other RNA
cacagtcctaaatgtggcatt

SEQ ID NO: 6075 - RNA, 21 nt, synthetic construct
  misc_feature 1..21: note = Description of Artificial Sequence: Synthetic oligonucleotide
  source 1..21: mol_type = other RNA
cagtcctaaatgtggcctatt

SEQ ID NO: 6076 - RNA, 21 nt, synthetic construct
  misc_feature 1..21: note = Description of Artificial Sequence: Synthetic oligonucleotide
  source 1..21: mol_type = other RNA
tccaaccaggagtgtaacatt

SEQ ID NO: 6077 - RNA, 21 nt, synthetic construct
  misc_feature 1..21: note = Description of Artificial Sequence: Synthetic oligonucleotide
  source 1..21: mol_type = other RNA
caaccaggagtgtaacatatt

SEQ ID NO: 6078 - RNA, 21 nt, synthetic construct
  misc_feature 1..21: note = Description of Artificial Sequence: Synthetic oligonucleotide
  source 1..21: mol_type = other RNA
ccaggagtgtaacatcaaatt

SEQ ID NO: 6079 - RNA, 21 nt, synthetic construct
  misc_feature 1..21: note = Description of Artificial Sequence: Synthetic oligonucleotide
  source 1..21: mol_type = other RNA
gagtgtaacatcaagcacatt

SEQ ID NO: 6080 - RNA, 21 nt, synthetic construct
  misc_feature 1..21: note = Description of Artificial Sequence: Synthetic oligonucleotide
  source 1..21: mol_type = other RNA
tgcctgctttacccacaaatt

SEQ ID NO: 6081 - RNA, 21 nt, synthetic construct
  misc_feature 1..21: note = Description of Artificial Sequence: Synthetic oligonucleotide
  source 1..21: mol_type = other RNA
ggtcctggaaggaattatatt

SEQ ID NO: 6082 - RNA, 21 nt, synthetic construct
  misc_feature 1..21: note = Description of Artificial Sequence: Synthetic oligonucleotide
  source 1..21: mol_type = other RNA
tataatccccaaccgagtatt

SEQ ID NO: 6083 - RNA, 21 nt, synthetic construct
  misc_feature 1..21: note = Description of Artificial Sequence: Synthetic oligonucleotide
  source 1..21: mol_type = other RNA
tcttcacgcgtgtctctgatt

SEQ ID NO: 6084 - RNA, 21 nt, synthetic construct
  misc_feature 1..21: note = Description of Artificial Sequence: Synthetic oligonucleotide
  source 1..21: mol_type = other RNA
cacgcgtgtctctgtgttatt

SEQ ID NO: 6085 - RNA, 21 nt, synthetic construct
  misc_feature 1..21: note = Description of Artificial Sequence: Synthetic oligonucleotide
  source 1..21: mol_type = other RNA
aacttcttgtcagacataatt

SEQ ID NO: 6086 - RNA, 21 nt, synthetic construct
  misc_feature 1..21: note = Description of Artificial Sequence: Synthetic oligonucleotide
  source 1..21: mol_type = other RNA
cttcttgtcagacataaaatt

SEQ ID NO: 6087 - RNA, 21 nt, synthetic construct
  misc_feature 1..21: note = Description of Artificial Sequence: Synthetic oligonucleotide
  source 1..21: mol_type = other RNA
taaattacttgccccagcttt

SEQ ID NO: 6088 - RNA, 21 nt, synthetic construct
  misc_feature 1..21: note = Description of Artificial Sequence: Synthetic oligonucleotide
  source 1..21: mol_type = other RNA
tgggtgacattaaactttttt

SEQ ID NO: 6089 - RNA, 21 nt, synthetic construct
  misc_feature 1..21: note = Description of Artificial Sequence: Synthetic oligonucleotide
  source 1..21: mol_type = other RNA
tgcccctgggtgacattaatt

SEQ ID NO: 6090 - RNA, 21 nt, synthetic construct
  misc_feature 1..21: note = Description of Artificial Sequence: Synthetic oligonucleotide
  source 1..21: mol_type = other RNA
ttttggtggggacacttgatt

SEQ ID NO: 6091 - RNA, 21 nt, synthetic construct
  misc_feature 1..21: note = Description of Artificial Sequence: Synthetic oligonucleotide
  source 1..21: mol_type = other RNA
tgttaggaaggtttggtggtt

SEQ ID NO: 6092 - RNA, 21 nt, synthetic construct
  misc_feature 1..21: note = Description of Artificial Sequence: Synthetic oligonucleotide
  source 1..21: mol_type = other RNA
ttgttaggaaggtttggtgtt

SEQ ID NO: 6093 - RNA, 21 nt, synthetic construct
  misc_feature 1..21: note = Description of Artificial Sequence: Synthetic oligonucleotide
  source 1..21: mol_type = other RNA
tataggtcagttgcaagggtt

SEQ ID NO: 6094 - RNA, 21 nt, synthetic construct
  misc_feature 1..21: note = Description of Artificial Sequence: Synthetic oligonucleotide
  source 1..21: mol_type = other RNA
tcccataggtcagttgcaatt

SEQ ID NO: 6095 - RNA, 21 nt, synthetic construct
  misc_feature 1..21: note = Description of Artificial Sequence: Synthetic oligonucleotide
  source 1..21: mol_type = other RNA
ttcccataggtcagttgcatt

SEQ ID NO: 6096 - RNA, 21 nt, synthetic construct
  misc_feature 1..21: note = Description of Artificial Sequence: Synthetic oligonucleotide
  source 1..21: mol_type = other RNA
tacctgtccctacgggatttt

SEQ ID NO: 6097 - RNA, 21 nt, synthetic construct
  misc_feature 1..21: note = Description of Artificial Sequence: Synthetic oligonucleotide
  source 1..21: mol_type = other RNA
tgtacccaaccccattgtttt

SEQ ID NO: 6098 - RNA, 21 nt, synthetic construct
  misc_feature 1..21: note = Description of Artificial Sequence: Synthetic oligonucleotide
  source 1..21: mol_type = other RNA
tttccggcaatagttgtcgtt

SEQ ID NO: 6099 - RNA, 21 nt, synthetic construct
  misc_feature 1..21: note = Description of Artificial Sequence: Synthetic oligonucleotide
  source 1..21: mol_type = other RNA
tattccggcaatagttgtctt

SEQ ID NO: 6100 - RNA, 21 nt, synthetic construct
  misc_feature 1..21: note = Description of Artificial Sequence: Synthetic oligonucleotide
  source 1..21: mol_type = other RNA
tctgcggatccgtagtgtatt

SEQ ID NO: 6101 - RNA, 21 nt, synthetic construct
  misc_feature 1..21: note = Description of Artificial Sequence: Synthetic oligonucleotide
  source 1..21: mol_type = other RNA
tacagaactctcgctcgattt

SEQ ID NO: 6102 - RNA, 21 nt, synthetic construct
  misc_feature 1..21: note = Description of Artificial Sequence: Synthetic oligonucleotide
  source 1..21: mol_type = other RNA
taacgtgaactgcggcttgtt

SEQ ID NO: 6103 - RNA, 21 nt, synthetic construct
  misc_feature 1..21: note = Description of Artificial Sequence: Synthetic oligonucleotide
  source 1..21: mol_type = other RNA
taaacgtgaactgcggctttt

SEQ ID NO: 6104 - RNA, 21 nt, synthetic construct
  misc_feature 1..21: note = Description of Artificial Sequence: Synthetic oligonucleotide
  source 1..21: mol_type = other RNA
ttaaacgtgaactgcggcttt

SEQ ID NO: 6105 - RNA, 21 nt, synthetic construct
  misc_feature 1..21: note = Description of Artificial Sequence: Synthetic oligonucleotide
  source 1..21: mol_type = other RNA
tttccgcaagctgactgtctt

SEQ ID NO: 6106 - RNA, 21 nt, synthetic construct
  misc_feature 1..21: note = Description of Artificial Sequence: Synthetic oligonucleotide
  source 1..21: mol_type = other RNA
tattccgcaagctgactgttt

SEQ ID NO: 6107 - RNA, 21 nt, synthetic construct
  misc_feature 1..21: note = Description of Artificial Sequence: Synthetic oligonucleotide
  source 1..21: mol_type = other RNA
taccatacctcatagcccgtt

SEQ ID NO: 6108 - RNA, 21 nt, synthetic construct
  misc_feature 1..21: note = Description of Artificial Sequence: Synthetic oligonucleotide
  source 1..21: mol_type = other RNA
taaccatacctcatagccctt

SEQ ID NO: 6109 - RNA, 21 nt, synthetic construct
  misc_feature 1..21: note = Description of Artificial Sequence: Synthetic oligonucleotide
  source 1..21: mol_type = other RNA
tcaccacataccattcaggtt

SEQ ID NO: 6110 - RNA, 21 nt, synthetic construct
  misc_feature 1..21: note = Description of Artificial Sequence: Synthetic oligonucleotide
  source 1..21: mol_type = other RNA
tttaggactgtgtcattactt

SEQ ID NO: 6111 - RNA, 21 nt, synthetic construct
  misc_feature 1..21: note = Description of Artificial Sequence: Synthetic oligonucleotide
  source 1..21: mol_type = other RNA
ttttaggactgtgtcattatt

SEQ ID NO: 6112 - RNA, 21 nt, synthetic construct
  misc_feature 1..21: note = Description of Artificial Sequence: Synthetic oligonucleotide
  source 1..21: mol_type = other RNA
tgccacatttaggactgtgtt

SEQ ID NO: 6113 - RNA, 21 nt, synthetic construct
  misc_feature 1..21: note = Description of Artificial Sequence: Synthetic oligonucleotide
  source 1..21: mol_type = other RNA
taggccacatttaggactgtt

SEQ ID NO: 6114 - RNA, 21 nt, synthetic construct
  misc_feature 1..21: note = Description of Artificial Sequence: Synthetic oligonucleotide
  source 1..21: mol_type = other RNA
tgttacactcctggttggatt

SEQ ID NO: 6115 - RNA, 21 nt, synthetic construct
  misc_feature 1..21: note = Description of Artificial Sequence: Synthetic oligonucleotide
  source 1..21: mol_type = other RNA
tatgttacactcctggttgtt

SEQ ID NO: 6116 - RNA, 21 nt, synthetic construct
  misc_feature 1..21: note = Description of Artificial Sequence: Synthetic oligonucleotide
  source 1..21: mol_type = other RNA
tttgatgttacactcctggtt

SEQ ID NO: 6117 - RNA, 21 nt, synthetic construct
  misc_feature 1..21: note = Description of Artificial Sequence: Synthetic oligonucleotide
  source 1..21: mol_type = other RNA
tgtgcttgatgttacactctt

SEQ ID NO: 6118 - RNA, 21 nt, synthetic construct
  misc_feature 1..21: note = Description of Artificial Sequence: Synthetic oligonucleotide
  source 1..21: mol_type = other RNA
tttgtgggtaaagcaggcatt

SEQ ID NO: 6119 - RNA, 21 nt, synthetic construct
  misc_feature 1..21: note = Description of Artificial Sequence: Synthetic oligonucleotide
  source 1..21: mol_type = other RNA
tataattccttccaggacctt

SEQ ID NO: 6120 - RNA, 21 nt, synthetic construct
  misc_feature 1..21: note = Description of Artificial Sequence: Synthetic oligonucleotide
  source 1..21: mol_type = other RNA
tactcggttggggattatatt

SEQ ID NO: 6121 - RNA, 21 nt, synthetic construct
  misc_feature 1..21: note = Description of Artificial Sequence: Synthetic oligonucleotide
  source 1..21: mol_type = other RNA
tcagagacacgcgtgaagatt

SEQ ID NO: 6122 - RNA, 21 nt, synthetic construct
  misc_feature 1..21: note = Description of Artificial Sequence: Synthetic oligonucleotide
  source 1..21: mol_type = other RNA
taacacagagacacgcgtgtt

SEQ ID NO: 6123 - RNA, 21 nt, synthetic construct
  misc_feature 1..21: note = Description of Artificial Sequence: Synthetic oligonucleotide
  source 1..21: mol_type = other RNA
ttatgtctgacaagaagtttt

SEQ ID NO: 6124 - RNA, 21 nt, synthetic construct
  misc_feature 1..21: note = Description of Artificial Sequence: Synthetic oligonucleotide
  source 1..21: mol_type = other RNA
ttttatgtctgacaagaagtt

SEQ ID NO: 6125 - RNA, 21 nt, synthetic construct
  misc_feature 1..21: note = Description of Artificial Sequence: Synthetic oligonucleotide
  source 1..21: mol_type = other RNA
agctggggcaagtaatttatt

SEQ ID NO: 6126 - RNA, 21 nt, synthetic construct
  misc_feature 1..21: note = Description of Artificial Sequence: Synthetic oligonucleotide
  source 1..21: mol_type = other RNA
aaaagtttaatgtcacccatt

SEQ ID NO: 6127 - RNA, 21 nt, synthetic construct
  misc_feature 1..21: note = Description of Artificial Sequence: Synthetic oligonucleotide
  source 1..21: mol_type = other RNA
ttaatgtcacccaggggcatt

SEQ ID NO: 6128 - RNA, 21 nt, synthetic construct
  misc_feature 1..21: note = Description of Artificial Sequence: Synthetic oligonucleotide
  source 1..21: mol_type = other RNA
tcaagtgtccccaccaaaatt

SEQ ID NO: 6129 - RNA, 21 nt, synthetic construct
  misc_feature 1..21: note = Description of Artificial Sequence: Synthetic oligonucleotide
  source 1..21: mol_type = other RNA
ccaccaaaccttcctaacatt

SEQ ID NO: 6130 - RNA, 21 nt, synthetic construct
  misc_feature 1..21: note = Description of Artificial Sequence: Synthetic oligonucleotide
  source 1..21: mol_type = other RNA
caccaaaccttcctaacaatt

SEQ ID NO: 6131 - RNA, 21 nt, synthetic construct
  misc_feature 1..21: note = Description of Artificial Sequence: Synthetic oligonucleotide
  source 1..21: mol_type = other RNA
cccttgcaactgacctatatt

SEQ ID NO: 6132 - RNA, 21 nt, synthetic construct
  misc_feature 1..21: note = Description of Artificial Sequence: Synthetic oligonucleotide
  source 1..21: mol_type = other RNA
ttgcaactgacctatgggatt

SEQ ID NO: 6133 - RNA, 21 nt, synthetic construct
  misc_feature 1..21: note = Description of Artificial Sequence: Synthetic oligonucleotide
  source 1..21: mol_type = other RNA
tgcaactgacctatgggaatt

SEQ ID NO: 6134 - RNA, 21 nt, synthetic construct
  misc_feature 1..21: note = Description of Artificial Sequence: Synthetic oligonucleotide
  source 1..21: mol_type = other RNA
aatcccgtagggacaggtatt

SEQ ID NO: 6135 - RNA, 21 nt, synthetic construct
  misc_feature 1..21: note = Description of Artificial Sequence: Synthetic oligonucleotide
  source 1..21: mol_type = other RNA
aacaatggggttgggtacatt

SEQ ID NO: 6136 - RNA, 21 nt, synthetic construct
  misc_feature 1..21: note = Description of Artificial Sequence: Synthetic oligonucleotide
  source 1..21: mol_type = other RNA
cgacaactattgccggaaatt

SEQ ID NO: 6137 - RNA, 21 nt, synthetic construct
  misc_feature 1..21: note = Description of Artificial Sequence: Synthetic oligonucleotide
  source 1..21: mol_type = other RNA
gacaactattgccggaatatt

SEQ ID NO: 6138 - RNA, 21 nt, synthetic construct
  misc_feature 1..21: note = Description of Artificial Sequence: Synthetic oligonucleotide
  source 1..21: mol_type = other RNA
tacactacggatccgcagatt

SEQ ID NO: 6139 - RNA, 21 nt, synthetic construct
  misc_feature 1..21: note = Description of Artificial Sequence: Synthetic oligonucleotide
  source 1..21: mol_type = other RNA
atcgagcgagagttctgtatt

SEQ ID NO: 6140 - RNA, 21 nt, synthetic construct
  misc_feature 1..21: note = Description of Artificial Sequence: Synthetic oligonucleotide
  source 1..21: mol_type = other RNA
caagccgcagttcacgttatt

SEQ ID NO: 6141 - RNA, 21 nt, synthetic construct
  misc_feature 1..21: note = Description of Artificial Sequence: Synthetic oligonucleotide
  source 1..21: mol_type = other RNA
aagccgcagttcacgtttatt

SEQ ID NO: 6142 - RNA, 21 nt, synthetic construct
  misc_feature 1..21: note = Description of Artificial Sequence: Synthetic oligonucleotide
  source 1..21: mol_type = other RNA
agccgcagttcacgtttaatt

SEQ ID NO: 6143 - RNA, 21 nt, synthetic construct
  misc_feature 1..21: note = Description of Artificial Sequence: Synthetic oligonucleotide
  source 1..21: mol_type = other RNA
gacagtcagcttgcggaaatt

SEQ ID NO: 6144 - RNA, 21 nt, synthetic construct
  misc_feature 1..21: note = Description of Artificial Sequence: Synthetic oligonucleotide
  source 1..21: mol_type = other RNA
acagtcagcttgcggaatatt

SEQ ID NO: 6145 - RNA, 21 nt, synthetic construct
  misc_feature 1..21: note = Description of Artificial Sequence: Synthetic oligonucleotide
  source 1..21: mol_type = other RNA
cgggctatgaggtatggtatt

SEQ ID NO: 6146 - RNA, 21 nt, synthetic construct
  misc_feature 1..21: note = Description of Artificial Sequence: Synthetic oligonucleotide
  source 1..21: mol_type = other RNA
gggctatgaggtatggttatt

SEQ ID NO: 6147 - RNA, 21 nt, synthetic construct
  misc_feature 1..21: note = Description of Artificial Sequence: Synthetic oligonucleotide
  source 1..21: mol_type = other RNA
cctgaatggtatgtggtgatt

SEQ ID NO: 6148 - RNA, 21 nt, synthetic construct
  misc_feature 1..21: note = Description of Artificial Sequence: Synthetic oligonucleotide
  source 1..21: mol_type = other RNA
gtaatgacacagtcctaaatt

SEQ ID NO: 6149 - RNA, 21 nt, synthetic construct
  misc_feature 1..21: note = Description of Artificial Sequence: Synthetic oligonucleotide
  source 1..21: mol_type = other RNA
taatgacacagtcctaaaatt

SEQ ID NO: 6150 - RNA, 21 nt, synthetic construct
  misc_feature 1..21: note = Description of Artificial Sequence: Synthetic oligonucleotide
  source 1..21: mol_type = other RNA
cacagtcctaaatgtggcatt

SEQ ID NO: 6151 - RNA, 21 nt, synthetic construct
  misc_feature 1..21: note = Description of Artificial Sequence: Synthetic oligonucleotide
  source 1..21: mol_type = other RNA
cagtcctaaatgtggcctatt

SEQ ID NO: 6152 - RNA, 21 nt, synthetic construct
  misc_feature 1..21: note = Description of Artificial Sequence: Synthetic oligonucleotide
  source 1..21: mol_type = other RNA
tccaaccaggagtgtaacatt

SEQ ID NO: 6153 - RNA, 21 nt, synthetic construct
  misc_feature 1..21: note = Description of Artificial Sequence: Synthetic oligonucleotide
  source 1..21: mol_type = other RNA
caaccaggagtgtaacatatt

SEQ ID NO: 6154 - RNA, 21 nt, synthetic construct
  misc_feature 1..21: note = Description of Artificial Sequence: Synthetic oligonucleotide
  source 1..21: mol_type = other RNA
ccaggagtgtaacatcaaatt

SEQ ID NO: 6155 - RNA, 21 nt, synthetic construct
  misc_feature 1..21: note = Description of Artificial Sequence: Synthetic oligonucleotide
  source 1..21: mol_type = other RNA
gagtgtaacatcaagcacatt

SEQ ID NO: 6156 - RNA, 21 nt, synthetic construct
  misc_feature 1..21: note = Description of Artificial Sequence: Synthetic oligonucleotide
  source 1..21: mol_type = other RNA
tgcctgctttacccacaaatt

SEQ ID NO: 6157 - RNA, 21 nt, synthetic construct
  misc_feature 1..21: note = Description of Artificial Sequence: Synthetic oligonucleotide
  source 1..21: mol_type = other RNA
ggtcctggaaggaattatatt

SEQ ID NO: 6158 - RNA, 21 nt, synthetic construct
  misc_feature 1..21: note = Description of Artificial Sequence: Synthetic oligonucleotide
  source 1..21: mol_type = other RNA
tataatccccaaccgagtatt

SEQ ID NO: 6159 - RNA, 21 nt, synthetic construct
  misc_feature 1..21: note = Description of Artificial Sequence: Synthetic oligonucleotide
  source 1..21: mol_type = other RNA
tcttcacgcgtgtctctgatt

SEQ ID NO: 6160 - RNA, 21 nt, synthetic construct
  misc_feature 1..21: note = Description of Artificial Sequence: Synthetic oligonucleotide
  source 1..21: mol_type = other RNA
cacgcgtgtctctgtgttatt

SEQ ID NO: 6161 - RNA, 21 nt, synthetic construct
  misc_feature 1..21: note = Description of Artificial Sequence: Synthetic oligonucleotide
  source 1..21: mol_type = other RNA
aacttcttgtcagacataatt

SEQ ID NO: 6162 - RNA, 21 nt, synthetic construct
  misc_feature 1..21: note = Description of Artificial Sequence: Synthetic oligonucleotide
  source 1..21: mol_type = other RNA
cttcttgtcagacataaaatt

SEQ ID NO: 6163 - DNA, 2621 bp, Homo sapiens
  source 1..2621: mol_type = genomic DNA
gaagctggggcaagtaattttccccaatttacagggaaaaaccgaaattcagaaaagtttaatgtcacccaggggctggagcccagacctctggcagctctcactttcacaatgcccttgggctgactaggctgcagaggggtttcaccccaaccccagggcacctcaagtgtccccaccaaaccttcctaacacctgtccactaagctgtactaggcccttgcaactgacctatgggacctgaggcctggcccctcatggctcctgtcaccaggtctcaggtcagggtccagcaggccctgagctgacgtgtggagccagagccacccaatcccgtagggacaggtttcacaacttcccggatggggctgtggtgggtcacagtgcagcctccagccagaaggatggggtggctcccactcctgctgcttctgactcaatgcttaggggtccctgggcagcgctcgccattgaatgacttccaagtgctccggggcacagagctacagcacctgctacatgcggtggtgcccgggccttggcaggaggatgtggcagatgctgaagagtgtgctggtcgctgtgggcccttaatggactgccgggccttccactacaacgtgagcagccatggttgccaactgctgccatggactcaacactcgccccacacgaggctgcggcgttctgggcgctgtgacctcttccagaagaaagactacgtacggacctgcatcatgaacaatggggttgggtaccggggcaccatggccacgaccgtgggtggcctgccctgccaggcttggagccacaagttcccaaatgatcacaagtacacgcccactctccggaatggcctggaagagaacttctgccgtaaccctgatggcgaccccggaggtccttggtgctacacaacagaccctgctgtgcgcttccagagctgcggcatcaaatcctgccgggaggccgcgtgtgtctggtgcaatggcgaggaataccgcggcgcggtagaccgcacggagtcagggcgcgagtgccagcgctgggatcttcagcacccgcaccagcaccccttcgagccgggcaagttcctcgaccaaggtctggacgacaactattgccggaatcctgacggctccgagcggccatggtgctacactacggatccgcagatcgagcgagagttctgtgacctcccccgctgcgggtccgaggcacagccccgccaagaggccacaactgtcagctgcttccgcgggaagggtgagggctaccggggcacagccaataccaccactgcgggcgtaccttgccagcgttgggacgcgcaaatcccgcatcagcaccgatttacgccagaaaaatacgcgtgcaaagaccttcgggagaacttctgccggaaccccgacggctcagaggcgccctggtgcttcacactgcggcccggcatgcgcgcggccttttgctaccagatccggcgttgtacagacgacgtgcggccccaggactgctaccacggcgcaggggagcagtaccgcggcacggtcagcaagacccgcaagggtgtccagtgccagcgctggtccgctgagacgccgcacaagccgcagttcacgtttacctccgaaccgcatgcacaactggaggagaacttctgccggaacccagatggggatagccatgggccctggtgctacacgatggacccaaggaccccattcgactactgtgccctgcgacgctgcgctgatgaccagccgccatcaatcctggaccccccagaccaggtgcagtttgagaagtgtggcaagagggtggatcggctggatcagcggcgttccaagctgcgcgtggttgggggccatccgggcaactcaccctggacagtcagcttgcggaatcggcagggccagcatttctgcggggggtctctagtgaaggagcagtggatactgactgcccggcagtgcttctcctcctgccatatgcctctcacgggctatgaggtatggttgggcaccctgttccagaacccacagcatggagagccaagcctacagcgggtcccagtagccaagatggtgtgtgggccctcaggctcccagcttgtcctgctcaagctggagagatctgtgaccctgaaccagcgtgtggccctgatctgcctgccccctgaatggtatgtggtgcctccagggaccaagtgtgagattgcaggctggggtgagaccaaaggtacgggtaatgacacagtcctaaatgtggccttgctgaatgtcatctccaaccaggagtgtaacatcaagcaccgaggacgtgtgcgggagagtgagatgtgcactgagggactgttggcccctgtgggggcctgtgagggtgactacgggggcccacttgcctgctttacccacaactgctgggtcctggaaggaattataatccccaaccgagtatgcgcaaggtcccgctggccagctgtcttcacgcgtgtctctgtgtttgtggactggattcacaaggtcatgagactgggttaggcccagccttgatgccatatgccttggggaggacaaaacttcttgtcagacataaagccatgtttcctctttatgcctgta

SEQ ID NO: 6164-6181 - skipped (18 entries)

SEQ ID NO: 6182 - protein, 5 aa, synthetic construct
  REGION 1..5: note = Description of Artificial Sequence: Synthetic peptide
  MOD_RES 4: note = D-amino acid
RGDFC

SEQ ID NO: 6183 - protein, 5 aa, synthetic construct
  REGION 1..5: note = Description of Artificial Sequence: Synthetic peptide
  MOD_RES 4: note = D-amino acid
RGDFK

SEQ ID NO: 6184 - protein, 4 aa, synthetic construct
  REGION 1..4: note = Description of Artificial Sequence: Synthetic peptide
  MOD_RES 4: note = D-amino acid
RGDF

SEQ ID NO: 6185 - DNA, 3042 bp, Homo sapiens
  source 1..3042: mol_type = genomic DNA
cagcctccgctaggggaccccctccatggcttcccaccgggttgttccaggcctcagcttcgccgaaaggcctcaccacctccgacctccgcctgctctggggatgctcccagccctgctgcggcagaacgcgacatgctaaccggaatccctaggccgcctgtctcctacccatacttagaggccccgctcagacggtccttaaaacgtctgaaaggccgttcctgccagagtccctgctacctgttacctccacccctatttagtcctagtggacagcctcgctcaccttccctgggatgacacttctggcggctgagatgagcgagcctctctgggctctgccgccgggtgtgggctgacctgcctacagctggggcctgataaggcagcagcaaaagggtggaggggaggcagtgttgaagctggggcaagtaattttccccaatttacagggaaaaaccgaaattcagaaaagtttaatgtcacccaggggctggagcccagacctctggcagctctcactttcacaatgcccttgggctgactaggctgcagaggggtttcaccccaaccccagggcacctcaagtgtccccaccaaaccttcctaacacctgtccactaagctgtactaggcccttgcaactgacctatgggacctgaggcctggcccctcatggctcctgtcaccaggtctcaggtcagggtccagcaggccctgagctgacgtgtggagccagagccacccaatcccgtagggacaggtttcacaacttcccggatggggctgtggtgggtcacagtgcagcctccagccagaaggatggggtggctcccactcctgctgcttctgactcaatgcttaggggtccctgggcagcgctcgccattgaatgacttccaagtgctccggggcacagagctacagcacctgctacatgcggtggtgcccgggccttggcaggaggatgtggcagatgctgaagagtgtgctggtcgctgtgggcccttaatggactgccgggccttccactacaacgtgagcagccatggttgccaactgctgccatggactcaacactcgccccacacgaggctgcggcgttctgggcgctgtgacctcttccagaagaaagactacgtacggacctgcatcatgaacaatggggttgggtaccggggcaccatggccacgaccgtgggtggcctgccctgccaggcttggagccacaagttcccaaatgatcacaagtacacgcccactctccggaatggcctggaagagaacttctgccgtaaccctgatggcgaccccggaggtccttggtgctacacaacagaccctgctgtgcgcttccagagctgcggcatcaaatcctgccgggaggccgcgtgtgtctggtgcaatggcgaggaataccgcggcgcggtagaccgcacggagtcagggcgcgagtgccagcgctgggatcttcagcacccgcaccagcaccccttcgagccgggcaagttcctcgaccaaggtctggacgacaactattgccggaatcctgacggctccgagcggccatggtgctacactacggatccgcagatcgagcgagagttctgtgacctcccccgctgcgggtccgaggcacagccccgccaagaggccacaactgtcagctgcttccgcgggaagggtgagggctaccggggcacagccaataccaccactgcgggcgtaccttgccagcgttgggacgcgcaaatcccgcatcagcaccgatttacgccagaaaaatacgcgtgcaaagaccttcgggagaacttctgccggaaccccgacggctcagaggcgccctggtgcttcacactgcggcccggcatgcgcgcggccttttgctaccagatccggcgttgtacagacgacgtgcggccccaggactgctaccacggcgcaggggagcagtaccgcggcacggtcagcaagacccgcaagggtgtccagtgccagcgctggtccgctgagacgccgcacaagccgcagttcacgtttacctccgaaccgcatgcacaactggaggagaacttctgccggaacccagatggggatagccatgggccctggtgctacacgatggacccaaggaccccattcgactactgtgccctgcgacgctgcgctgatgaccagccgccatcaatcctggaccccccagaccaggtgcagtttgagaagtgtggcaagagggtggatcggctggatcagcggcgttccaagctgcgcgtggttgggggccatccgggcaactcaccctggacagtcagcttgcggaatcggcagggccagcatttctgcggggggtctctagtgaaggagcagtggatactgactgcccggcagtgcttctcctcctgccatatgcctctcacgggctatgaggtatggttgggcaccctgttccagaacccacagcatggagagccaagcctacagcgggtcccagtagccaagatggtgtgtgggccctcaggctcccagcttgtcctgctcaagctggagagatctgtgaccctgaaccagcgtgtggccctgatctgcctgccccctgaatggtatgtggtgcctccagggaccaagtgtgagattgcaggctggggtgagaccaaaggtacgggtaatgacacagtcctaaatgtggccttgctgaatgtcatctccaaccaggagtgtaacatcaagcaccgaggacgtgtgcgggagagtgagatgtgcactgagggactgttggcccctgtgggggcctgtgagggtgactacgggggcccacttgcctgctttacccacaactgctgggtcctggaaggaattataatccccaaccgagtatgcgcaaggtcccgctggccagctgtcttcacgcgtgtctctgtgtttgtggactggattcacaaggtcatgagactgggttaggcccagccttgatgccatatgccttggggaggacaaaacttcttgtcagacataaagccatgtttcctctttatgcctgta

SEQ ID NO: 6186 - RNA, 21 nt, synthetic construct
  misc_feature 1..21: note = Description of Artificial Sequence: Synthetic oligonucleotide
  source 1..21: mol_type = other RNA
cttcttgtcagacataaaatt

SEQ ID NO: 6187 - RNA, 21 nt, synthetic construct
  misc_feature 1..21: note = Description of Artificial Sequence: Synthetic oligonucleotide
  source 1..21: mol_type = other RNA
aaaagtttaatgtcacccatt

SEQ ID NO: 6188 - RNA, 21 nt, synthetic construct
  misc_feature 1..21: note = Description of Artificial Sequence: Synthetic oligonucleotide
  misc_feature 1..21: note = Description of Combined DNA/RNA Molecule: Synthetic oligonucleotide
  source 1..21: mol_type = other RNA
aacttcttgtcagacataatt

SEQ ID NO: 6189 - RNA, 21 nt, synthetic construct
  misc_feature 1..21: note = Description of Artificial Sequence: Synthetic oligonucleotide
  misc_feature 1..21: note = Description of Combined DNA/RNA Molecule: Synthetic oligonucleotide
  source 1..21: mol_type = other RNA
taatgacacagtcctaaaatt

SEQ ID NO: 6190 - RNA, 21 nt, synthetic construct
  misc_feature 1..21: note = Description of Artificial Sequence: Synthetic oligonucleotide
  source 1..21: mol_type = other RNA
gtaatgacacagtcctaaatt

SEQ ID NO: 6191 - RNA, 21 nt, synthetic construct
  misc_feature 1..21: note = Description of Artificial Sequence: Synthetic oligonucleotide
  source 1..21: mol_type = other RNA
ggtcctggaaggaattatatt

SEQ ID NO: 6192 - RNA, 21 nt, synthetic construct
  misc_feature 1..21: note = Description of Artificial Sequence: Synthetic oligonucleotide
  source 1..21: mol_type = other RNA
caaccaggagtgtaacatatt

SEQ ID NO: 6193 - RNA, 21 nt, synthetic construct
  misc_feature 1..21: note = Description of Artificial Sequence: Synthetic oligonucleotide
  source 1..21: mol_type = other RNA
cctgaatggtatgtggtgatt

SEQ ID NO: 6194 - RNA, 21 nt, synthetic construct
  misc_feature 1..21: note = Description of Artificial Sequence: Synthetic oligonucleotide
  source 1..21: mol_type = other RNA
cacagtcctaaatgtggcatt

SEQ ID NO: 6195 - RNA, 21 nt, synthetic construct
  misc_feature 1..21: note = Description of Artificial Sequence: Synthetic oligonucleotide
  source 1..21: mol_type = other RNA
caagccgcagttcacgttatt

SEQ ID NO: 6196 - RNA, 21 nt, synthetic construct
  misc_feature 1..21: note = Description of Artificial Sequence: Synthetic oligonucleotide
  source 1..21: mol_type = other RNA
tcttcacgcgtgtctctgatt

SEQ ID NO: 6197 - RNA, 21 nt, synthetic construct
  misc_feature 1..21: note = Description of Artificial Sequence: Synthetic oligonucleotide
  source 1..21: mol_type = other RNA
actattgccggaatcctgatt

SEQ ID NO: 6198 - RNA, 21 nt, synthetic construct
  misc_feature 1..21: note = Description of Artificial Sequence: Synthetic oligonucleotide
  source 1..21: mol_type = other RNA
attcgactactgtgccctatt

SEQ ID NO: 6199 - RNA, 21 nt, synthetic construct
  misc_feature 1..21: note = Description of Artificial Sequence: Synthetic oligonucleotide
  source 1..21: mol_type = other RNA
agtttgagaagtgtggcaatt

SEQ ID NO: 6200 - RNA, 21 nt, synthetic construct
  misc_feature 1..21: note = Description of Artificial Sequence: Synthetic oligonucleotide
  source 1..21: mol_type = other RNA
atgacacagtcctaaatgatt

SEQ ID NO: 6201 - RNA, 21 nt, synthetic construct
  misc_feature 1..21: note = Description of Artificial Sequence: Synthetic oligonucleotide
  source 1..21: mol_type = other RNA
acaaaacttcttgtcagaatt

SEQ ID NO: 6202 - RNA, 21 nt, synthetic construct
  misc_feature 1..21: note = Description of Artificial Sequence: Synthetic oligonucleotide
  source 1..21: mol_type = other RNA
acttcttgtcagacataaatt

SEQ ID NO: 6203 - RNA, 21 nt, synthetic construct
  misc_feature 1..21: note = Description of Artificial Sequence: Synthetic oligonucleotide
  source 1..21: mol_type = other RNA
ggtcctggaaggaattatatt

SEQ ID NO: 6204 - RNA, 21 nt, synthetic construct
  misc_feature 1..21: note = Description of Artificial Sequence: Synthetic oligonucleotide
  misc_feature 1..21: note = Description of Combined DNA/RNA Molecule: Synthetic oligonucleotide
  source 1..21: mol_type = other RNA
aacttcttgtcagacataatt

SEQ ID NO: 6205 - RNA, 21 nt, synthetic construct
  misc_feature 1..21: note = Description of Artificial Sequence: Synthetic oligonucleotide
  source 1..21: mol_type = other RNA
cttcttgtcagacataaaatt

SEQ ID NO: 6206 - RNA, 21 nt, synthetic construct
  misc_feature 1..21: note = Description of Artificial Sequence: Synthetic oligonucleotide
  source 1..21: mol_type = other RNA
caaccaggagtgtaacatatt

SEQ ID NO: 6207 - RNA, 21 nt, synthetic construct
  misc_feature 1..21: note = Description of Artificial Sequence: Synthetic oligonucleotide
  source 1..21: mol_type = other RNA
cttcttgtcagacataaattt

SEQ ID NO: 6208 - RNA, 21 nt, synthetic construct
  misc_feature 1..21: note = Description of Artificial Sequence: Synthetic oligonucleotide
  source 1..21: mol_type = other RNA
cttcttgtcagacataaaatt

SEQ ID NO: 6209 - RNA, 21 nt, synthetic construct
  misc_feature 1..21: note = Description of Artificial Sequence: Synthetic oligonucleotide
  source 1..21: mol_type = other RNA
cttcttgtcagacataaaatt

SEQ ID NO: 6210 - RNA, 21 nt, synthetic construct
  misc_feature 1..21: note = Description of Artificial Sequence: Synthetic oligonucleotide
  source 1..21: mol_type = other RNA
cttcttgtcagacataaaatt

SEQ ID NO: 6211 - RNA, 21 nt, synthetic construct
  misc_feature 1..21: note = Description of Artificial Sequence: Synthetic oligonucleotide
  source 1..21: mol_type = other RNA
cttcttgtcagacataaagtt

SEQ ID NO: 6212 - RNA, 21 nt, synthetic construct
  misc_feature 1..21: note = Description of Artificial Sequence: Synthetic oligonucleotide
  source 1..21: mol_type = other RNA
ggtcctggaaggaattatatt

SEQ ID NO: 6213 - RNA, 21 nt, synthetic construct
  misc_feature 1..21: note = Description of Artificial Sequence: Synthetic oligonucleotide
  source 1..21: mol_type = other RNA
ggtcctggaaggaattatatt

SEQ ID NO: 6214 - RNA, 21 nt, synthetic construct
  misc_feature 1..21: note = Description of Artificial Sequence: Synthetic oligonucleotide
  source 1..21: mol_type = other RNA
ggtcctggaaggaattatatt

SEQ ID NO: 6215 - RNA, 21 nt, synthetic construct
  misc_feature 1..21: note = Description of Artificial Sequence: Synthetic oligonucleotide
  source 1..21: mol_type = other RNA
ggtcctggaaggaattatatt

SEQ ID NO: 6216 - RNA, 21 nt, synthetic construct
  misc_feature 1..21: note = Description of Artificial Sequence: Synthetic oligonucleotide
  source 1..21: mol_type = other RNA
ggtcctggaaggaattatatt

SEQ ID NO: 6217 - RNA, 21 nt, synthetic construct
  misc_feature 1..21: note = Description of Artificial Sequence: Synthetic oligonucleotide
  source 1..21: mol_type = other RNA
ggtcctggaaggaattatttt

SEQ ID NO: 6218 - RNA, 21 nt, synthetic construct
  misc_feature 1..21: note = Description of Artificial Sequence: Synthetic oligonucleotide
  source 1..21: mol_type = other RNA
gacaactattgccggaatatt

SEQ ID NO: 6219 - RNA, 21 nt, synthetic construct
  misc_feature 1..21: note = Description of Artificial Sequence: Synthetic oligonucleotide
  source 1..21: mol_type = other RNA
tgacacagtcctaaatgtatt

SEQ ID NO: 6220 - RNA, 21 nt, synthetic construct
  misc_feature 1..21: note = Description of Artificial Sequence: Synthetic oligonucleotide
  source 1..21: mol_type = other RNA
agtcctaaatgtggccttatt

SEQ ID NO: 6221 - RNA, 21 nt, synthetic construct
  misc_feature 1..21: note = Description of Artificial Sequence: Synthetic oligonucleotide
  source 1..21: mol_type = other RNA
gagtgtaacatcaagcacatt

SEQ ID NO: 6222 - RNA, 21 nt, synthetic construct
  misc_feature 1..21: note = Description of Artificial Sequence: Synthetic oligonucleotide
  source 1..21: mol_type = other RNA
gtgtaacatcaagcaccgatt

SEQ ID NO: 6223 - RNA, 21 nt, synthetic construct
  misc_feature 1..21: note = Description of Artificial Sequence: Synthetic oligonucleotide
  source 1..21: mol_type = other RNA
attataatccccaaccgaatt

SEQ ID NO: 6224 - RNA, 21 nt, synthetic construct
  misc_feature 1..21: note = Description of Artificial Sequence: Synthetic oligonucleotide
  source 1..21: mol_type = other RNA
tataatccccaaccgagtatt

SEQ ID NO: 6225 - RNA, 21 nt, synthetic construct
  misc_feature 1..21: note = Description of Artificial Sequence: Synthetic oligonucleotide
  source 1..21: mol_type = other RNA
tcttgtcagacataaagcatt

SEQ ID NO: 6226 - RNA, 21 nt, synthetic construct
  misc_feature 1..21: note = Description of Artificial Sequence: Synthetic oligonucleotide
  source 1..21: mol_type = other RNA
ttgtcagacataaagccaatt

SEQ ID NO: 6227 - RNA, 21 nt, synthetic construct
  misc_feature 1..21: note = Description of Artificial Sequence: Synthetic oligonucleotide
  source 1..21: mol_type = other RNA
acttcttgtcagacataaatt

SEQ ID NO: 6228 - RNA, 21 nt, synthetic construct
  misc_feature 1..21: note = Description of Artificial Sequence: Synthetic oligonucleotide
  source 1..21: mol_type = other RNA
acttcttgtcagacataaatt

SEQ ID NO: 6229 - RNA, 21 nt, synthetic construct
  misc_feature 1..21: note = Description of Artificial Sequence: Synthetic oligonucleotide
  source 1..21: mol_type = other RNA
acttcttgtcagacataaatt

SEQ ID NO: 6230 - RNA, 21 nt, synthetic construct
  misc_feature 1..21: note = Description of Artificial Sequence: Synthetic oligonucleotide
  source 1..21: mol_type = other RNA
acttcttgtcagacataattt

SEQ ID NO: 6231 - RNA, 21 nt, synthetic construct
  misc_feature 1..21: note = Description of Artificial Sequence: Synthetic oligonucleotide
  source 1..21: mol_type = other RNA
acttcttgtcagacataaatt

SEQ ID NO: 6232 - RNA, 21 nt, synthetic construct
  misc_feature 1..21: note = Description of Artificial Sequence: Synthetic oligonucleotide
  source 1..21: mol_type = other RNA
acttcttgtcagacataaatt

SEQ ID NO: 6233 - RNA, 21 nt, synthetic construct
  misc_feature 1..21: note = Description of Artificial Sequence: Synthetic oligonucleotide
  source 1..21: mol_type = other RNA
acttcttgtcagacataaatt

SEQ ID NO: 6234 - RNA, 21 nt, synthetic construct
  misc_feature 1..21: note = Description of Artificial Sequence: Synthetic oligonucleotide
  source 1..21: mol_type = other RNA
acttcttgtcagacataaatt

SEQ ID NO: 6235 - RNA, 21 nt, synthetic construct
  misc_feature 1..21: note = Description of Artificial Sequence: Synthetic oligonucleotide
  source 1..21: mol_type = other RNA
tcttgtcagacataaagcatt

SEQ ID NO: 6236 - RNA, 21 nt, synthetic construct
  misc_feature 1..21: note = Description of Artificial Sequence: Synthetic oligonucleotide
  source 1..21: mol_type = other RNA
tcttgtcagacataaagcatt

SEQ ID NO: 6237 - RNA, 21 nt, synthetic construct
  misc_feature 1..21: note = Description of Artificial Sequence: Synthetic oligonucleotide
  source 1..21: mol_type = other RNA
tcttgtcagacataaagcatt

SEQ ID NO: 6238 - RNA, 21 nt, synthetic construct
  misc_feature 1..21: note = Description of Artificial Sequence: Synthetic oligonucleotide
  source 1..21: mol_type = other RNA
tcttgtcagacataaagcatt

SEQ ID NO: 6239 - RNA, 21 nt, synthetic construct
  misc_feature 1..21: note = Description of Artificial Sequence: Synthetic oligonucleotide
  misc_feature 1..21: note = Description of Combined DNA/RNA Molecule: Synthetic oligonucleotide
  source 1..21: mol_type = other RNA
ttgtcagacataaagccaatt

SEQ ID NO: 6240 - RNA, 21 nt, synthetic construct
  misc_feature 1..21: note = Description of Artificial Sequence: Synthetic oligonucleotide
  misc_feature 1..21: note = Description of Combined DNA/RNA Molecule: Synthetic oligonucleotide
  source 1..21: mol_type = other RNA
ttgtcagacataaagccaatt

SEQ ID NO: 6241 - RNA, 21 nt, synthetic construct
  misc_feature 1..21: note = Description of Artificial Sequence: Synthetic oligonucleotide
  source 1..21: mol_type = other RNA
ttgtcagacataaagccaatt

SEQ ID NO: 6242 - RNA, 21 nt, synthetic construct
  misc_feature 1..21: note = Description of Artificial Sequence: Synthetic oligonucleotide
  source 1..21: mol_type = other RNA
ttgtcagacataaagccaatt

SEQ ID NO: 6243 - RNA, 21 nt, synthetic construct
  misc_feature 1..21: note = Description of Artificial Sequence: Synthetic oligonucleotide
  source 1..21: mol_type = other RNA
ttgtcagacataaagccaatt

SEQ ID NO: 6244 - RNA, 21 nt, synthetic construct
  misc_feature 1..21: note = Description of Artificial Sequence: Synthetic oligonucleotide
  source 1..21: mol_type = other RNA
ttgtcagacataaagccaatt

SEQ ID NO: 6245 - RNA, 21 nt, synthetic construct
  misc_feature 1..21: note = Description of Artificial Sequence: Synthetic oligonucleotide
  source 1..21: mol_type = other RNA
ttttatgtctgacaagaagtt

SEQ ID NO: 6246 - RNA, 21 nt, synthetic construct
  misc_feature 1..21: note = Description of Artificial Sequence: Synthetic oligonucleotide
  source 1..21: mol_type = other RNA
tgggtgacattaaactttttt

SEQ ID NO: 6247 - RNA, 21 nt, synthetic construct
  misc_feature 1..21: note = Description of Artificial Sequence: Synthetic oligonucleotide
  source 1..21: mol_type = other RNA
ttatgtctgacaagaagtttt

SEQ ID NO: 6248 - RNA, 21 nt, synthetic construct
  misc_feature 1..21: note = Description of Artificial Sequence: Synthetic oligonucleotide
  source 1..21: mol_type = other RNA
ttttaggactgtgtcattatt

SEQ ID NO: 6249 - RNA, 21 nt, synthetic construct
  misc_feature 1..21: note = Description of Artificial Sequence: Synthetic oligonucleotide
  source 1..21: mol_type = other RNA
tttaggactgtgtcattactt

SEQ ID NO: 6250 - RNA, 21 nt, synthetic construct
  misc_feature 1..21: note = Description of Artificial Sequence: Synthetic oligonucleotide
  source 1..21: mol_type = other RNA
tataattccttccaggacctt

SEQ ID NO: 6251 - RNA, 21 nt, synthetic construct
  misc_feature 1..21: note = Description of Artificial Sequence: Synthetic oligonucleotide
  source 1..21: mol_type = other RNA
tatgttacactcctggttgtt

SEQ ID NO: 6252 - RNA, 21 nt, synthetic construct
  misc_feature 1..21: note = Description of Artificial Sequence: Synthetic oligonucleotide
  source 1..21: mol_type = other RNA
tcaccacataccattcaggtt

SEQ ID NO: 6253 - RNA, 21 nt, synthetic construct
  misc_feature 1..21: note = Description of Artificial Sequence: Synthetic oligonucleotide
  source 1..21: mol_type = other RNA
tgccacatttaggactgtgtt

SEQ ID NO: 6254 - RNA, 21 nt, synthetic construct
  misc_feature 1..21: note = Description of Artificial Sequence: Synthetic oligonucleotide
  source 1..21: mol_type = other RNA
taacgtgaactgcggcttgtt

SEQ ID NO: 6255 - RNA, 21 nt, synthetic construct
  misc_feature 1..21: note = Description of Artificial Sequence: Synthetic oligonucleotide
  source 1..21: mol_type = other RNA
tcagagacacgcgtgaagatt

SEQ ID NO: 6256 - RNA, 21 nt, synthetic construct
  misc_feature 1..21: note = Description of Artificial Sequence: Synthetic oligonucleotide
  source 1..21: mol_type = other RNA
tcaggattccggcaatagttt

SEQ ID NO: 6257 - RNA, 21 nt, synthetic construct
  misc_feature 1..21: note = Description of Artificial Sequence: Synthetic oligonucleotide
  source 1..21: mol_type = other RNA
tagggcacagtagtcgaattt

SEQ ID NO: 6258 - RNA, 21 nt, synthetic construct
  misc_feature 1..21: note = Description of Artificial Sequence: Synthetic oligonucleotide
  source 1..21: mol_type = other RNA
ttgccacacttctcaaacttt

SEQ ID NO: 6259 - RNA, 21 nt, synthetic construct
  misc_feature 1..21: note = Description of Artificial Sequence: Synthetic oligonucleotide
  source 1..21: mol_type = other RNA
tcatttaggactgtgtcattt

SEQ ID NO: 6260 - RNA, 21 nt, synthetic construct
  misc_feature 1..21: note = Description of Artificial Sequence: Synthetic oligonucleotide
  source 1..21: mol_type = other RNA
ttctgacaagaagttttgttt

SEQ ID NO: 6261 - RNA, 21 nt, synthetic construct
  misc_feature 1..21: note = Description of Artificial Sequence: Synthetic oligonucleotide
  source 1..21: mol_type = other RNA
tttatgtctgacaagaagttt

SEQ ID NO: 6262 - RNA, 21 nt, synthetic construct
  misc_feature 1..21: note = Description of Artificial Sequence: Synthetic oligonucleotide
  source 1..21: mol_type = other RNA
tataattccttccaggacctt

SEQ ID NO: 6263 - RNA, 21 nt, synthetic construct
  misc_feature 1..21: note = Description of Artificial Sequence: Synthetic oligonucleotide
  source 1..21: mol_type = other RNA
ttatgtctgacaagaagtttt

SEQ ID NO: 6264 - RNA, 21 nt, synthetic construct
  misc_feature 1..21: note = Description of Artificial Sequence: Synthetic oligonucleotide
  source 1..21: mol_type = other RNA
ttttatgtctgacaagaagtt

SEQ ID NO: 6265 - RNA, 21 nt, synthetic construct
  misc_feature 1..21: note = Description of Artificial Sequence: Synthetic oligonucleotide
  source 1..21: mol_type = other RNA
tatgttacactcctggttgtt

SEQ ID NO: 6266 - RNA, 21 nt, synthetic construct
  misc_feature 1..21: note = Description of Artificial Sequence: Synthetic oligonucleotide
  source 1..21: mol_type = other RNA
atttatgtctgacaagaagtt

SEQ ID NO: 6267 - RNA, 21 nt, synthetic construct
  misc_feature 1..21: note = Description of Artificial Sequence: Synthetic oligonucleotide
  source 1..21: mol_type = other RNA
ttttatgtctgacaagaagtt

SEQ ID NO: 6268 - RNA, 21 nt, synthetic construct
  misc_feature 1..21: note = Description of Artificial Sequence: Synthetic oligonucleotide
  source 1..21: mol_type = other RNA
ttttatgtctgacaagaagtt

SEQ ID NO: 6269 - RNA, 21 nt, synthetic construct
  misc_feature 1..21: note = Description of Artificial Sequence: Synthetic oligonucleotide
  source 1..21: mol_type = other RNA
ttttatgtctgacaagaagtt

SEQ ID NO: 6270 - RNA, 21 nt, synthetic construct
  misc_feature 1..21: note = Description of Artificial Sequence: Synthetic oligonucleotide
  source 1..21: mol_type = other RNA
ctttatgtctgacaagaagtt

SEQ ID NO: 6271 - RNA, 21 nt, synthetic construct
  misc_feature 1..21: note = Description of Artificial Sequence: Synthetic oligonucleotide
  source 1..21: mol_type = other RNA
tataattccttccaggacctt

SEQ ID NO: 6272 - RNA, 21 nt, synthetic construct
  misc_feature 1..21: note = Description of Artificial Sequence: Synthetic oligonucleotide
  source 1..21: mol_type = other RNA
tataattccttccaggacctt

SEQ ID NO: 6273 - RNA, 21 nt, synthetic construct
  misc_feature 1..21: note = Description of Artificial Sequence: Synthetic oligonucleotide
  source 1..21: mol_type = other RNA
tataattccttccaggacctt

SEQ ID NO: 6274 - RNA, 21 nt, synthetic construct
  misc_feature 1..21: note = Description of Artificial Sequence: Synthetic oligonucleotide
  source 1..21: mol_type = other RNA
tataattccttccaggacctt

SEQ ID NO: 6275 - RNA, 21 nt, synthetic construct
  misc_feature 1..21: note = Description of Artificial Sequence: Synthetic oligonucleotide
  source 1..21: mol_type = other RNA
tataattccttccaggacctt

SEQ ID NO: 6276 - RNA, 21 nt, synthetic construct
  misc_feature 1..21: note = Description of Artificial Sequence: Synthetic oligonucleotide
  source 1..21: mol_type = other RNA
aataattccttccaggacctt

SEQ ID NO: 6277 - RNA, 21 nt, synthetic construct
  misc_feature 1..21: note = Description of Artificial Sequence: Synthetic oligonucleotide
  source 1..21: mol_type = other RNA
tattccggcaatagttgtctt

SEQ ID NO: 6278 - RNA, 21 nt, synthetic construct
  misc_feature 1..21: note = Description of Artificial Sequence: Synthetic oligonucleotide
  source 1..21: mol_type = other RNA
tacatttaggactgtgtcatt

SEQ ID NO: 6279 - RNA, 21 nt, synthetic construct
  misc_feature 1..21: note = Description of Artificial Sequence: Synthetic oligonucleotide
  source 1..21: mol_type = other RNA
taaggccacatttaggacttt

SEQ ID NO: 6280 - RNA, 21 nt, synthetic construct
  misc_feature 1..21: note = Description of Artificial Sequence: Synthetic oligonucleotide
  source 1..21: mol_type = other RNA
tgtgcttgatgttacactctt

SEQ ID NO: 6281 - RNA, 21 nt, synthetic construct
  misc_feature 1..21: note = Description of Artificial Sequence: Synthetic oligonucleotide
  source 1..21: mol_type = other RNA
tcggtgcttgatgttacactt

SEQ ID NO: 6282 - RNA, 21 nt, synthetic construct
  misc_feature 1..21: note = Description of Artificial Sequence: Synthetic oligonucleotide
  source 1..21: mol_type = other RNA
ttcggttggggattataattt

SEQ ID NO: 6283 - RNA, 21 nt, synthetic construct
  misc_feature 1..21: note = Description of Artificial Sequence: Synthetic oligonucleotide
  source 1..21: mol_type = other RNA
tactcggttggggattatatt

SEQ ID NO: 6284 - RNA, 21 nt, synthetic construct
  misc_feature 1..21: note = Description of Artificial Sequence: Synthetic oligonucleotide
  source 1..21: mol_type = other RNA
tgctttatgtctgacaagatt

SEQ ID NO: 6285 - RNA, 21 nt, synthetic construct
  misc_feature 1..21: note = Description of Artificial Sequence: Synthetic oligonucleotide
  source 1..21: mol_type = other RNA
ttggctttatgtctgacaatt

SEQ ID NO: 6286 - RNA, 21 nt, synthetic construct
  misc_feature 1..21: note = Description of Artificial Sequence: Synthetic oligonucleotide
  source 1..21: mol_type = other RNA
tttatgtctgacaagaagttt

SEQ ID NO: 6287 - RNA, 21 nt, synthetic construct
  misc_feature 1..21: note = Description of Artificial Sequence: Synthetic oligonucleotide
  source 1..21: mol_type = other RNA
tttatgtctgacaagaagttt

SEQ ID NO: 6288 - RNA, 21 nt, synthetic construct
  misc_feature 1..21: note = Description of Artificial Sequence: Synthetic oligonucleotide
  source 1..21: mol_type = other RNA
tttatgtctgacaagaagttt

SEQ ID NO: 6289 - RNA, 21 nt, synthetic construct
  misc_feature 1..21: note = Description of Artificial Sequence: Synthetic oligonucleotide
  source 1..21: mol_type = other RNA
attatgtctgacaagaagttt

SEQ ID NO: 6290 - RNA, 21 nt, synthetic construct
  misc_feature 1..21: note = Description of Artificial Sequence: Synthetic oligonucleotide
  source 1..21: mol_type = other RNA
tttatgtctgacaagaagttt

SEQ ID NO: 6291 - RNA, 21 nt, synthetic construct
  misc_feature 1..21: note = Description of Artificial Sequence: Synthetic oligonucleotide
  source 1..21: mol_type = other RNA
tttatgtctgacaagaagttt

SEQ ID NO: 6292 - RNA, 21 nt, synthetic construct
  misc_feature 1..21: note = Description of Artificial Sequence: Synthetic oligonucleotide
  source 1..21: mol_type = other RNA
tttatgtctgacaagaagttt

SEQ ID NO: 6293 - RNA, 21 nt, synthetic construct
  misc_feature 1..21: note = Description of Artificial Sequence: Synthetic oligonucleotide
  source 1..21: mol_type = other RNA
tttatgtctgacaagaagttt

SEQ ID NO: 6294 - RNA, 21 nt, synthetic construct
  misc_feature 1..21: note = Description of Artificial Sequence: Synthetic oligonucleotide
  source 1..21: mol_type = other RNA
tgctttatgtctgacaagatt

SEQ ID NO: 6295 - RNA, 21 nt, synthetic construct
  misc_feature 1..21: note = Description of Artificial Sequence: Synthetic oligonucleotide
  source 1..21: mol_type = other RNA
tgctttatgtctgacaagatt

SEQ ID NO: 6296 - RNA, 21 nt, synthetic construct
  misc_feature 1..21: note = Description of Artificial Sequence: Synthetic oligonucleotide
  source 1..21: mol_type = other RNA
tgctttatgtctgacaagatt

SEQ ID NO: 6297 - RNA, 21 nt, synthetic construct
  misc_feature 1..21: note = Description of Artificial Sequence: Synthetic oligonucleotide
  source 1..21: mol_type = other RNA
tgctttatgtctgacaagatt

SEQ ID NO: 6298 - RNA, 21 nt, synthetic construct
  misc_feature 1..21: note = Description of Artificial Sequence: Synthetic oligonucleotide
  source 1..21: mol_type = other RNA
ttggctttatgtctgacaatt

SEQ ID NO: 6299 - RNA, 21 nt, synthetic construct
  misc_feature 1..21: note = Description of Artificial Sequence: Synthetic oligonucleotide
  source 1..21: mol_type = other RNA
ttggctttatgtctgacaatt

SEQ ID NO: 6300 - RNA, 21 nt, synthetic construct
  misc_feature 1..21: note = Description of Artificial Sequence: Synthetic oligonucleotide
  source 1..21: mol_type = other RNA
ttggctttatgtctgacaatt

SEQ ID NO: 6301 - RNA, 21 nt, synthetic construct
  misc_feature 1..21: note = Description of Artificial Sequence: Synthetic oligonucleotide
  source 1..21: mol_type = other RNA
ttggctttatgtctgacaatt

SEQ ID NO: 6302 - RNA, 21 nt, synthetic construct
  misc_feature 1..21: note = Description of Artificial Sequence: Synthetic oligonucleotide
  source 1..21: mol_type = other RNA
ttggctttatgtctgacaatt

SEQ ID NO: 6303 - RNA, 21 nt, synthetic construct
  misc_feature 1..21: note = Description of Artificial Sequence: Synthetic oligonucleotide
  source 1..21: mol_type = other RNA
ttggctttatgtctgacaatt

SEQ ID NO: 6304-6316 - skipped (13 entries)

SEQ ID NO: 6317 - RNA, 21 nt, synthetic construct
  misc_feature 1..21: note = Description of Artificial Sequence: Synthetic oligonucleotide
  source 1..21: mol_type = other RNA
cctgcattatggacaatgatt

SEQ ID NO: 6318 - RNA, 21 nt, synthetic construct
  misc_feature 1..21: note = Description of Artificial Sequence: Synthetic oligonucleotide
  source 1..21: mol_type = other RNA
tcattgtccataatgcaggtt

SEQ ID NO: 6319-6357 - skipped (39 entries)

SEQ ID NO: 6358 - RNA, 21 nt, synthetic construct
  misc_feature 1..21: note = Description of Artificial Sequence: Synthetic oligonucleotide
  source 1..21: mol_type = other RNA
aaaagtttaatgtcacccatt

SEQ ID NO: 6359 - RNA, 21 nt, synthetic construct
  misc_feature 1..21: note = Description of Artificial Sequence: Synthetic oligonucleotide
  source 1..21: mol_type = other RNA
aacttcttgtcagacataatt

SEQ ID NO: 6360 - RNA, 21 nt, synthetic construct
  misc_feature 1..21: note = Description of Artificial Sequence: Synthetic oligonucleotide
  source 1..21: mol_type = other RNA
taatgacacagtcctaaaatt

SEQ ID NO: 6361 - RNA, 21 nt, synthetic construct
  misc_feature 1..21: note = Description of Artificial Sequence: Synthetic oligonucleotide
  source 1..21: mol_type = other RNA
gtaatgacacagtcctaaatt

SEQ ID NO: 6362 - RNA, 21 nt, synthetic construct
  misc_feature 1..21: note = Description of Artificial Sequence: Synthetic oligonucleotide
  source 1..21: mol_type = other RNA
caaccaggagtgtaacatatt

SEQ ID NO: 6363 - RNA, 21 nt, synthetic construct
  misc_feature 1..21: note = Description of Artificial Sequence: Synthetic oligonucleotide
  source 1..21: mol_type = other RNA
cctgaatggtatgtggtgatt

SEQ ID NO: 6364 - RNA, 21 nt, synthetic construct
  misc_feature 1..21: note = Description of Artificial Sequence: Synthetic oligonucleotide
  source 1..21: mol_type = other RNA
cacagtcctaaatgtggcatt

SEQ ID NO: 6365 - RNA, 21 nt, synthetic construct
  misc_feature 1..21: note = Description of Artificial Sequence: Synthetic oligonucleotide
  source 1..21: mol_type = other RNA
caagccgcagttcacgttatt

SEQ ID NO: 6366 - RNA, 21 nt, synthetic construct
  misc_feature 1..21: note = Description of Artificial Sequence: Synthetic oligonucleotide
  source 1..21: mol_type = other RNA
tcttcacgcgtgtctctgatt

SEQ ID NO: 6367 - RNA, 21 nt, synthetic construct
  misc_feature 1..21: note = Description of Artificial Sequence: Synthetic oligonucleotide
  source 1..21: mol_type = other RNA
actattgccggaatcctgatt

SEQ ID NO: 6368 - RNA, 21 nt, synthetic construct
  misc_feature 1..21: note = Description of Artificial Sequence: Synthetic oligonucleotide
  source 1..21: mol_type = other RNA
attcgactactgtgccctatt

SEQ ID NO: 6369 - RNA, 21 nt, synthetic construct
  misc_feature 1..21: note = Description of Artificial Sequence: Synthetic oligonucleotide
  source 1..21: mol_type = other RNA
agtttgagaagtgtggcaatt

SEQ ID NO: 6370 - RNA, 21 nt, synthetic construct
  misc_feature 1..21: note = Description of Artificial Sequence: Synthetic oligonucleotide
  source 1..21: mol_type = other RNA
atgacacagtcctaaatgatt

SEQ ID NO: 6371 - RNA, 21 nt, synthetic construct
  misc_feature 1..21: note = Description of Artificial Sequence: Synthetic oligonucleotide
  source 1..21: mol_type = other RNA
acaaaacttcttgtcagaatt

SEQ ID NO: 6372 - RNA, 21 nt, synthetic construct
  misc_feature 1..21: note = Description of Artificial Sequence: Synthetic oligonucleotide
  source 1..21: mol_type = other RNA
cttcttgtcagacataaattt

SEQ ID NO: 6373 - RNA, 21 nt, synthetic construct
  misc_feature 1..21: note = Description of Artificial Sequence: Synthetic oligonucleotide
  source 1..21: mol_type = other RNA
cttcttgtcagacataaaatt

SEQ ID NO: 6374 - RNA, 21 nt, synthetic construct
  misc_feature 1..21: note = Description of Artificial Sequence: Synthetic oligonucleotide
  source 1..21: mol_type = other RNA
cttcttgtcagacataaagtt

SEQ ID NO: 6375 - RNA, 21 nt, synthetic construct
  misc_feature 1..21: note = Description of Artificial Sequence: Synthetic oligonucleotide
  source 1..21: mol_type = other RNA
ggtcctggaaggaattatatt

SEQ ID NO: 6376 - RNA, 21 nt, synthetic construct
  misc_feature 1..21: note = Description of Artificial Sequence: Synthetic oligonucleotide
  source 1..21: mol_type = other RNA
ggtcctggaaggaattatttt

SEQ ID NO: 6377 - RNA, 21 nt, synthetic construct
  misc_feature 1..21: note = Description of Artificial Sequence: Synthetic oligonucleotide
  source 1..21: mol_type = other RNA
gacaactattgccggaatatt

SEQ ID NO: 6378 - RNA, 21 nt, synthetic construct
  misc_feature 1..21: note = Description of Artificial Sequence: Synthetic oligonucleotide
  source 1..21: mol_type = other RNA
tgacacagtcctaaatgtatt

SEQ ID NO: 6379 - RNA, 21 nt, synthetic construct
  misc_feature 1..21: note = Description of Artificial Sequence: Synthetic oligonucleotide
  source 1..21: mol_type = other RNA
agtcctaaatgtggccttatt

SEQ ID NO: 6380 - RNA, 21 nt, synthetic construct
  misc_feature 1..21: note = Description of Artificial Sequence: Synthetic oligonucleotide
  source 1..21: mol_type = other RNA
gagtgtaacatcaagcacatt

SEQ ID NO: 6381 - RNA, 21 nt, synthetic construct
  misc_feature 1..21: note = Description of Artificial Sequence: Synthetic oligonucleotide
  source 1..21: mol_type = other RNA
gtgtaacatcaagcaccgatt

SEQ ID NO: 6382 - RNA, 21 nt, synthetic construct
  misc_feature 1..21: note = Description of Artificial Sequence: Synthetic oligonucleotide
  source 1..21: mol_type = other RNA
attataatccccaaccgaatt

SEQ ID NO: 6383 - RNA, 21 nt, synthetic construct
  misc_feature 1..21: note = Description of Artificial Sequence: Synthetic oligonucleotide
  source 1..21: mol_type = other RNA
tataatccccaaccgagtatt

SEQ ID NO: 6384 - RNA, 21 nt, synthetic construct
  misc_feature 1..21: note = Description of Artificial Sequence: Synthetic oligonucleotide
  source 1..21: mol_type = other RNA
acttcttgtcagacataattt

SEQ ID NO: 6385 - RNA, 21 nt, synthetic construct
  misc_feature 1..21: note = Description of Artificial Sequence: Synthetic oligonucleotide
  source 1..21: mol_type = other RNA
acttcttgtcagacataaatt

SEQ ID NO: 6386 - RNA, 21 nt, synthetic construct
  misc_feature 1..21: note = Description of Artificial Sequence: Synthetic oligonucleotide
  source 1..21: mol_type = other RNA
tcttgtcagacataaagcatt

SEQ ID NO: 6387 - RNA, 21 nt, synthetic construct
  misc_feature 1..21: note = Description of Artificial Sequence: Synthetic oligonucleotide
  source 1..21: mol_type = other RNA
ttgtcagacataaagccaatt

SEQ ID NO: 6388 - RNA, 21 nt, synthetic construct
  misc_feature 1..21: note = Description of Artificial Sequence: Synthetic oligonucleotide
  source 1..21: mol_type = other RNA
tgggtgacattaaactttttt

SEQ ID NO: 6389 - RNA, 21 nt, synthetic construct
  misc_feature 1..21: note = Description of Artificial Sequence: Synthetic oligonucleotide
  source 1..21: mol_type = other RNA
ttatgtctgacaagaagtttt

SEQ ID NO: 6390 - RNA, 21 nt, synthetic construct
  misc_feature 1..21: note = Description of Artificial Sequence: Synthetic oligonucleotide
  source 1..21: mol_type = other RNA
ttttaggactgtgtcattatt

SEQ ID NO: 6391 - RNA, 21 nt, synthetic construct
  misc_feature 1..21: note = Description of Artificial Sequence: Synthetic oligonucleotide
  source 1..21: mol_type = other RNA
tttaggactgtgtcattactt

SEQ ID NO: 6392 - RNA, 21 nt, synthetic construct
  misc_feature 1..21: note = Description of Artificial Sequence: Synthetic oligonucleotide
  source 1..21: mol_type = other RNA
tatgttacactcctggttgtt

SEQ ID NO: 6393 - RNA, 21 nt, synthetic construct
  misc_feature 1..21: note = Description of Artificial Sequence: Synthetic oligonucleotide
  source 1..21: mol_type = other RNA
tcaccacataccattcaggtt

SEQ ID NO: 6394 - RNA, 21 nt, synthetic construct
  misc_feature 1..21: note = Description of Artificial Sequence: Synthetic oligonucleotide
  source 1..21: mol_type = other RNA
tgccacatttaggactgtgtt

SEQ ID NO: 6395 - RNA, 21 nt, synthetic construct
  misc_feature 1..21: note = Description of Artificial Sequence: Synthetic oligonucleotide
  source 1..21: mol_type = other RNA
taacgtgaactgcggcttgtt

SEQ ID NO: 6396 - RNA, 21 nt, synthetic construct
  misc_feature 1..21: note = Description of Artificial Sequence: Synthetic oligonucleotide
  source 1..21: mol_type = other RNA
tcagagacacgcgtgaagatt

SEQ ID NO: 6397 - RNA, 21 nt, synthetic construct
  misc_feature 1..21: note = Description of Artificial Sequence: Synthetic oligonucleotide
  source 1..21: mol_type = other RNA
tcaggattccggcaatagttt

SEQ ID NO: 6398 - RNA, 21 nt, synthetic construct
  misc_feature 1..21: note = Description of Artificial Sequence: Synthetic oligonucleotide
  source 1..21: mol_type = other RNA
tagggcacagtagtcgaattt

SEQ ID NO: 6399 - RNA, 21 nt, synthetic construct
  misc_feature 1..21: note = Description of Artificial Sequence: Synthetic oligonucleotide
  source 1..21: mol_type = other RNA
ttgccacacttctcaaacttt

SEQ ID NO: 6400 - RNA, 21 nt, synthetic construct
  misc_feature 1..21: note = Description of Artificial Sequence: Synthetic oligonucleotide
  source 1..21: mol_type = other RNA
tcatttaggactgtgtcattt

SEQ ID NO: 6401 - RNA, 21 nt, synthetic construct
  misc_feature 1..21: note = Description of Artificial Sequence: Synthetic oligonucleotide
  source 1..21: mol_type = other RNA
ttctgacaagaagttttgttt

SEQ ID NO: 6402 - RNA, 21 nt, synthetic construct
  misc_feature 1..21: note = Description of Artificial Sequence: Synthetic oligonucleotide
  source 1..21: mol_type = other RNA
atttatgtctgacaagaagtt

SEQ ID NO: 6403 - RNA, 21 nt, synthetic construct
  misc_feature 1..21: note = Description of Artificial Sequence: Synthetic oligonucleotide
  source 1..21: mol_type = other RNA
ttttatgtctgacaagaagtt

SEQ ID NO: 6404 - RNA, 21 nt, synthetic construct
  misc_feature 1..21: note = Description of Artificial Sequence: Synthetic oligonucleotide
  source 1..21: mol_type = other RNA
ctttatgtctgacaagaagtt

SEQ ID NO: 6405 - RNA, 21 nt, synthetic construct
  misc_feature 1..21: note = Description of Artificial Sequence: Synthetic oligonucleotide
  source 1..21: mol_type = other RNA
tataattccttccaggacctt

SEQ ID NO: 6406 - RNA, 21 nt, synthetic construct
  misc_feature 1..21: note = Description of Artificial Sequence: Synthetic oligonucleotide
  source 1..21: mol_type = other RNA
aataattccttccaggacctt

SEQ ID NO: 6407 - RNA, 21 nt, synthetic construct
  misc_feature 1..21: note = Description of Artificial Sequence: Synthetic oligonucleotide
  source 1..21: mol_type = other RNA
tattccggcaatagttgtctt

SEQ ID NO: 6408 - RNA, 21 nt, synthetic construct
  misc_feature 1..21: note = Description of Artificial Sequence: Synthetic oligonucleotide
  source 1..21: mol_type = other RNA
tacatttaggactgtgtcatt

SEQ ID NO: 6409 - RNA, 21 nt, synthetic construct
  misc_feature 1..21: note = Description of Artificial Sequence: Synthetic oligonucleotide
  source 1..21: mol_type = other RNA
taaggccacatttaggacttt

SEQ ID NO: 6410 - RNA, 21 nt, synthetic construct
  misc_feature 1..21: note = Description of Artificial Sequence: Synthetic oligonucleotide
  source 1..21: mol_type = other RNA
tgtgcttgatgttacactctt

SEQ ID NO: 6411 - RNA, 21 nt, synthetic construct
  misc_feature 1..21: note = Description of Artificial Sequence: Synthetic oligonucleotide
  source 1..21: mol_type = other RNA
tcggtgcttgatgttacactt

SEQ ID NO: 6412 - RNA, 21 nt, synthetic construct
  misc_feature 1..21: note = Description of Artificial Sequence: Synthetic oligonucleotide
  source 1..21: mol_type = other RNA
ttcggttggggattataattt

SEQ ID NO: 6413 - RNA, 21 nt, synthetic construct
  misc_feature 1..21: note = Description of Artificial Sequence: Synthetic oligonucleotide
  source 1..21: mol_type = other RNA
tactcggttggggattatatt

SEQ ID NO: 6414 - RNA, 21 nt, synthetic construct
  misc_feature 1..21: note = Description of Artificial Sequence: Synthetic oligonucleotide
  source 1..21: mol_type = other RNA
attatgtctgacaagaagttt

SEQ ID NO: 6415 - RNA, 21 nt, synthetic construct
  misc_feature 1..21: note = Description of Artificial Sequence: Synthetic oligonucleotide
  source 1..21: mol_type = other RNA
tttatgtctgacaagaagttt

SEQ ID NO: 6416 - RNA, 21 nt, synthetic construct
  misc_feature 1..21: note = Description of Artificial Sequence: Synthetic oligonucleotide
  source 1..21: mol_type = other RNA
tgctttatgtctgacaagatt

SEQ ID NO: 6417 - RNA, 21 nt, synthetic construct
  misc_feature 1..21: note = Description of Artificial Sequence: Synthetic oligonucleotide
  source 1..21: mol_type = other RNA
ttggctttatgtctgacaatt

SEQ ID NO: 6418 - RNA, 19 nt, synthetic construct
  misc_feature 1..19: note = Description of Artificial Sequence: Synthetic oligonucleotide
  source 1..19: mol_type = other RNA
cttcttgtcagacataaaa

SEQ ID NO: 6419 - RNA, 19 nt, synthetic construct
  misc_feature 1..19: note = Description of Artificial Sequence: Synthetic oligonucleotide
  source 1..19: mol_type = other RNA
aaaagtttaatgtcaccca

SEQ ID NO: 6420 - RNA, 19 nt, synthetic construct
  misc_feature 1..19: note = Description of Artificial Sequence: Synthetic oligonucleotide
  source 1..19: mol_type = other RNA
aacttcttgtcagacataa

SEQ ID NO: 6421 - RNA, 19 nt, synthetic construct
  misc_feature 1..19: note = Description of Artificial Sequence: Synthetic oligonucleotide
  source 1..19: mol_type = other RNA
taatgacacagtcctaaaa

SEQ ID NO: 6422 - RNA, 19 nt, synthetic construct
  misc_feature 1..19: note = Description of Artificial Sequence: Synthetic oligonucleotide
  source 1..19: mol_type = other RNA
gtaatgacacagtcctaaa

SEQ ID NO: 6423 - RNA, 19 nt, synthetic construct
  misc_feature 1..19: note = Description of Artificial Sequence: Synthetic oligonucleotide
  source 1..19: mol_type = other RNA
ggtcctggaaggaattata

SEQ ID NO: 6424 - RNA, 19 nt, synthetic construct
  misc_feature 1..19: note = Description of Artificial Sequence: Synthetic oligonucleotide
  source 1..19: mol_type = other RNA
caaccaggagtgtaacata

SEQ ID NO: 6425 - RNA, 19 nt, synthetic construct
  misc_feature 1..19: note = Description of Artificial Sequence: Synthetic oligonucleotide
  source 1..19: mol_type = other RNA
cctgaatggtatgtggtga

SEQ ID NO: 6426 - RNA, 19 nt, synthetic construct
  misc_feature 1..19: note = Description of Artificial Sequence: Synthetic oligonucleotide
  source 1..19: mol_type = other RNA
cacagtcctaaatgtggca

SEQ ID NO: 6427 - RNA, 19 nt, synthetic construct
  misc_feature 1..19: note = Description of Artificial Sequence: Synthetic oligonucleotide
  source 1..19: mol_type = other RNA
caagccgcagttcacgtta

SEQ ID NO: 6428 - RNA, 19 nt, synthetic construct
  misc_feature 1..19: note = Description of Artificial Sequence: Synthetic oligonucleotide
  source 1..19: mol_type = other RNA
tcttcacgcgtgtctctga

SEQ ID NO: 6429 - RNA, 19 nt, synthetic construct
  misc_feature 1..19: note = Description of Artificial Sequence: Synthetic oligonucleotide
  source 1..19: mol_type = other RNA
actattgccggaatcctga

SEQ ID NO: 6430 - RNA, 19 nt, synthetic construct
  misc_feature 1..19: note = Description of Artificial Sequence: Synthetic oligonucleotide
  source 1..19: mol_type = other RNA
attcgactactgtgcccta

SEQ ID NO: 6431 - RNA, 19 nt, synthetic construct
  misc_feature 1..19: note = Description of Artificial Sequence: Synthetic oligonucleotide
  source 1..19: mol_type = other RNA
agtttgagaagtgtggcaa

SEQ ID NO: 6432 - RNA, 19 nt, synthetic construct
  misc_feature 1..19: note = Description of Artificial Sequence: Synthetic oligonucleotide
  source 1..19: mol_type = other RNA
atgacacagtcctaaatga

SEQ ID NO: 6433 - RNA, 19 nt, synthetic construct
  misc_feature 1..19: note = Description of Artificial Sequence: Synthetic oligonucleotide
  source 1..19: mol_type = other RNA
acaaaacttcttgtcagaa

SEQ ID NO: 6434 - RNA, 19 nt, synthetic construct
  misc_feature 1..19: note = Description of Artificial Sequence: Synthetic oligonucleotide
  source 1..19: mol_type = other RNA
acttcttgtcagacataaa

SEQ ID NO: 6435 - RNA, 19 nt, synthetic construct
  misc_feature 1..19: note = Description of Artificial Sequence: Synthetic oligonucleotide
  source 1..19: mol_type = other RNA
ggtcctggaaggaattata

SEQ ID NO: 6436 - RNA, 19 nt, synthetic construct
  misc_feature 1..19: note = Description of Artificial Sequence: Synthetic oligonucleotide
  source 1..19: mol_type = other RNA
aacttcttgtcagacataa

SEQ ID NO: 6437 - RNA, 19 nt, synthetic construct
  misc_feature 1..19: note = Description of Artificial Sequence: Synthetic oligonucleotide
  source 1..19: mol_type = other RNA
cttcttgtcagacataaaa

SEQ ID NO: 6438 - RNA, 19 nt, synthetic construct
  misc_feature 1..19: note = Description of Artificial Sequence: Synthetic oligonucleotide
  source 1..19: mol_type = other RNA
caaccaggagtgtaacata

SEQ ID NO: 6439 - RNA, 19 nt, synthetic construct
  misc_feature 1..19: note = Description of Artificial Sequence: Synthetic oligonucleotide
  source 1..19: mol_type = other RNA
cttcttgtcagacataaat

SEQ ID NO: 6440 - RNA, 19 nt, synthetic construct
  misc_feature 1..19: note = Description of Artificial Sequence: Synthetic oligonucleotide
  source 1..19: mol_type = other RNA
cttcttgtcagacataaaa

SEQ ID NO: 6441 - RNA, 19 nt, synthetic construct
  misc_feature 1..19: note = Description of Artificial Sequence: Synthetic oligonucleotide
  source 1..19: mol_type = other RNA
cttcttgtcagacataaaa

SEQ ID NO: 6442 - RNA, 19 nt, synthetic construct
  misc_feature 1..19: note = Description of Artificial Sequence: Synthetic oligonucleotide
  source 1..19: mol_type = other RNA
cttcttgtcagacataaaa

SEQ ID NO: 6443 - RNA, 19 nt, synthetic construct
  misc_feature 1..19: note = Description of Artificial Sequence: Synthetic oligonucleotide
  source 1..19: mol_type = other RNA
cttcttgtcagacataaag

SEQ ID NO: 6444 - RNA, 19 nt, synthetic construct
  misc_feature 1..19: note = Description of Artificial Sequence: Synthetic oligonucleotide
  source 1..19: mol_type = other RNA
ggtcctggaaggaattata

SEQ ID NO: 6445 - RNA, 19 nt, synthetic construct
  misc_feature 1..19: note = Description of Artificial Sequence: Synthetic oligonucleotide
  source 1..19: mol_type = other RNA
ggtcctggaaggaattata

SEQ ID NO: 6446 - RNA, 19 nt, synthetic construct
  misc_feature 1..19: note = Description of Artificial Sequence: Synthetic oligonucleotide
  source 1..19: mol_type = other RNA
ggtcctggaaggaattata

SEQ ID NO: 6447 - RNA, 19 nt, synthetic construct
  misc_feature 1..19: note = Description of Artificial Sequence: Synthetic oligonucleotide
  source 1..19: mol_type = other RNA
ggtcctggaaggaattata

SEQ ID NO: 6448 - RNA, 19 nt, synthetic construct
  misc_feature 1..19: note = Description of Artificial Sequence: Synthetic oligonucleotide
  source 1..19: mol_type = other RNA
ggtcctggaaggaattata

SEQ ID NO: 6449 - RNA, 19 nt, synthetic construct
  misc_feature 1..19: note = Description of Artificial Sequence: Synthetic oligonucleotide
  source 1..19: mol_type = other RNA
ggtcctggaaggaattatt

SEQ ID NO: 6450 - RNA, 19 nt, synthetic construct
  misc_feature 1..19: note = Description of Artificial Sequence: Synthetic oligonucleotide
  source 1..19: mol_type = other RNA
gacaactattgccggaata

SEQ ID NO: 6451 - RNA, 19 nt, synthetic construct
  misc_feature 1..19: note = Description of Artificial Sequence: Synthetic oligonucleotide
  source 1..19: mol_type = other RNA
tgacacagtcctaaatgta

SEQ ID NO: 6452 - RNA, 19 nt, synthetic construct
  misc_feature 1..19: note = Description of Artificial Sequence: Synthetic oligonucleotide
  source 1..19: mol_type = other RNA
agtcctaaatgtggcctta

SEQ ID NO: 6453 - RNA, 19 nt, synthetic construct
  misc_feature 1..19: note = Description of Artificial Sequence: Synthetic oligonucleotide
  source 1..19: mol_type = other RNA
gagtgtaacatcaagcaca

SEQ ID NO: 6454 - RNA, 19 nt, synthetic construct
  misc_feature 1..19: note = Description of Artificial Sequence: Synthetic oligonucleotide
  source 1..19: mol_type = other RNA
gtgtaacatcaagcaccga

SEQ ID NO: 6455 - RNA, 19 nt, synthetic construct
  misc_feature 1..19: note = Description of Artificial Sequence: Synthetic oligonucleotide
  source 1..19: mol_type = other RNA
attataatccccaaccgaa

SEQ ID NO: 6456 - RNA, 19 nt, synthetic construct
  misc_feature 1..19: note = Description of Artificial Sequence: Synthetic oligonucleotide
  source 1..19: mol_type = other RNA
tataatccccaaccgagta

SEQ ID NO: 6457 - RNA, 19 nt, synthetic construct
  misc_feature 1..19: note = Description of Artificial Sequence: Synthetic oligonucleotide
  source 1..19: mol_type = other RNA
tcttgtcagacataaagca

SEQ ID NO: 6458 - RNA, 19 nt, synthetic construct
  misc_feature 1..19: note = Description of Artificial Sequence: Synthetic oligonucleotide
  source 1..19: mol_type = other RNA
ttgtcagacataaagccaa

SEQ ID NO: 6459 - RNA, 19 nt, synthetic construct
  misc_feature 1..19: note = Description of Artificial Sequence: Synthetic oligonucleotide
  source 1..19: mol_type = other RNA
acttcttgtcagacataaa

SEQ ID NO: 6460 - RNA, 19 nt, synthetic construct
  misc_feature 1..19: note = Description of Artificial Sequence: Synthetic oligonucleotide
  source 1..19: mol_type = other RNA
acttcttgtcagacataaa

SEQ ID NO: 6461 - RNA, 19 nt, synthetic construct
  misc_feature 1..19: note = Description of Artificial Sequence: Synthetic oligonucleotide
  source 1..19: mol_type = other RNA
acttcttgtcagacataaa

SEQ ID NO: 6462 - RNA, 19 nt, synthetic construct
  misc_feature 1..19: note = Description of Artificial Sequence: Synthetic oligonucleotide
  source 1..19: mol_type = other RNA
acttcttgtcagacataat

SEQ ID NO: 6463 - RNA, 19 nt, synthetic construct
  misc_feature 1..19: note = Description of Artificial Sequence: Synthetic oligonucleotide
  source 1..19: mol_type = other RNA
acttcttgtcagacataaa

SEQ ID NO: 6464 - RNA, 19 nt, synthetic construct
  misc_feature 1..19: note = Description of Artificial Sequence: Synthetic oligonucleotide
  source 1..19: mol_type = other RNA
acttcttgtcagacataaa

SEQ ID NO: 6465 - RNA, 19 nt, synthetic construct
  misc_feature 1..19: note = Description of Artificial Sequence: Synthetic oligonucleotide
  source 1..19: mol_type = other RNA
acttcttgtcagacataaa

SEQ ID NO: 6466 - RNA, 19 nt, synthetic construct
  misc_feature 1..19: note = Description of Artificial Sequence: Synthetic oligonucleotide
  source 1..19: mol_type = other RNA
acttcttgtcagacataaa

SEQ ID NO: 6467 - RNA, 19 nt, synthetic construct
  misc_feature 1..19: note = Description of Artificial Sequence: Synthetic oligonucleotide
  source 1..19: mol_type = other RNA
tcttgtcagacataaagca

SEQ ID NO: 6468 - RNA, 19 nt, synthetic construct
  misc_feature 1..19: note = Description of Artificial Sequence: Synthetic oligonucleotide
  source 1..19: mol_type = other RNA
tcttgtcagacataaagca

SEQ ID NO: 6469 - RNA, 19 nt, synthetic construct
  misc_feature 1..19: note = Description of Artificial Sequence: Synthetic oligonucleotide
  source 1..19: mol_type = other RNA
tcttgtcagacataaagca

SEQ ID NO: 6470 - RNA, 19 nt, synthetic construct
  misc_feature 1..19: note = Description of Artificial Sequence: Synthetic oligonucleotide
  source 1..19: mol_type = other RNA
tcttgtcagacataaagca

SEQ ID NO: 6471 - RNA, 19 nt, synthetic construct
  misc_feature 1..19: note = Description of Artificial Sequence: Synthetic oligonucleotide
  source 1..19: mol_type = other RNA
ttgtcagacataaagccaa

SEQ ID NO: 6472 - RNA, 19 nt, synthetic construct
  misc_feature 1..19: note = Description of Artificial Sequence: Synthetic oligonucleotide
  source 1..19: mol_type = other RNA
ttgtcagacataaagccaa

SEQ ID NO: 6473 - RNA, 19 nt, synthetic construct
  misc_feature 1..19: note = Description of Artificial Sequence: Synthetic oligonucleotide
  source 1..19: mol_type = other RNA
ttgtcagacataaagccaa

SEQ ID NO: 6474 - RNA, 19 nt, synthetic construct
  misc_feature 1..19: note = Description of Artificial Sequence: Synthetic oligonucleotide
  source 1..19: mol_type = other RNA
ttgtcagacataaagccaa

SEQ ID NO: 6475 - RNA, 19 nt, synthetic construct
  misc_feature 1..19: note = Description of Artificial Sequence: Synthetic oligonucleotide
  source 1..19: mol_type = other RNA
ttgtcagacataaagccaa

SEQ ID NO: 6476 - RNA, 19 nt, synthetic construct
  misc_feature 1..19: note = Description of Artificial Sequence: Synthetic oligonucleotide
  source 1..19: mol_type = other RNA
ttgtcagacataaagccaa

SEQ ID NO: 6477 - RNA, 19 nt, synthetic construct
  misc_feature 1..19: note = Description of Artificial Sequence: Synthetic oligonucleotide
  source 1..19: mol_type = other RNA
ttttatgtctgacaagaag

SEQ ID NO: 6478 - RNA, 19 nt, synthetic construct
  misc_feature 1..19: note = Description of Artificial Sequence: Synthetic oligonucleotide
  source 1..19: mol_type = other RNA
tgggtgacattaaactttt

SEQ ID NO: 6479 - RNA, 19 nt, synthetic construct
  misc_feature 1..19: note = Description of Artificial Sequence: Synthetic oligonucleotide
  source 1..19: mol_type = other RNA
ttatgtctgacaagaagtt

SEQ ID NO: 6480 - RNA, 19 nt, synthetic construct
  misc_feature 1..19: note = Description of Artificial Sequence: Synthetic oligonucleotide
  source 1..19: mol_type = other RNA
ttttaggactgtgtcatta

SEQ ID NO: 6481 - RNA, 19 nt, synthetic construct
  misc_feature 1..19: note = Description of Artificial Sequence: Synthetic oligonucleotide
  source 1..19: mol_type = other RNA
tttaggactgtgtcattac

SEQ ID NO: 6482 - RNA, 19 nt, synthetic construct
  misc_feature 1..19: note = Description of Artificial Sequence: Synthetic oligonucleotide
  source 1..19: mol_type = other RNA
tataattccttccaggacc

SEQ ID NO: 6483 - RNA, 19 nt, synthetic construct
  misc_feature 1..19: note = Description of Artificial Sequence: Synthetic oligonucleotide
  source 1..19: mol_type = other RNA
tatgttacactcctggttg

SEQ ID NO: 6484 - RNA, 19 nt, synthetic construct
  misc_feature 1..19: note = Description of Artificial Sequence: Synthetic oligonucleotide
  source 1..19: mol_type = other RNA
tcaccacataccattcagg

SEQ ID NO: 6485 - RNA, 19 nt, synthetic construct
  misc_feature 1..19: note = Description of Artificial Sequence: Synthetic oligonucleotide
  source 1..19: mol_type = other RNA
tgccacatttaggactgtg

SEQ ID NO: 6486 - RNA, 19 nt, synthetic construct
  misc_feature 1..19: note = Description of Artificial Sequence: Synthetic oligonucleotide
  source 1..19: mol_type = other RNA
taacgtgaactgcggcttg

SEQ ID NO: 6487 - RNA, 19 nt, synthetic construct
  misc_feature 1..19: note = Description of Artificial Sequence: Synthetic oligonucleotide
  source 1..19: mol_type = other RNA
tcagagacacgcgtgaaga

SEQ ID NO: 6488 - RNA, 19 nt, synthetic construct
  misc_feature 1..19: note = Description of Artificial Sequence: Synthetic oligonucleotide
  source 1..19: mol_type = other RNA
tcaggattccggcaatagt

SEQ ID NO: 6489 - RNA, 19 nt, synthetic construct
  misc_feature 1..19: note = Description of Artificial Sequence: Synthetic oligonucleotide
  source 1..19: mol_type = other RNA
tagggcacagtagtcgaat

SEQ ID NO: 6490 - RNA, 19 nt, synthetic construct
  misc_feature 1..19: note = Description of Artificial Sequence: Synthetic oligonucleotide
  source 1..19: mol_type = other RNA
ttgccacacttctcaaact

SEQ ID NO: 6491 - RNA, 19 nt, synthetic construct
  misc_feature 1..19: note = Description of Artificial Sequence: Synthetic oligonucleotide
  source 1..19: mol_type = other RNA
tcatttaggactgtgtcat

SEQ ID NO: 6492 - RNA, 19 nt, synthetic construct
  misc_feature 1..19: note = Description of Artificial Sequence: Synthetic oligonucleotide
  source 1..19: mol_type = other RNA
ttctgacaagaagttttgt

SEQ ID NO: 6493 - RNA, 19 nt, synthetic construct
  misc_feature 1..19: note = Description of Artificial Sequence: Synthetic oligonucleotide
  source 1..19: mol_type = other RNA
tttatgtctgacaagaagt

SEQ ID NO: 6494 - RNA, 19 nt, synthetic construct
  misc_feature 1..19: note = Description of Artificial Sequence: Synthetic oligonucleotide
  source 1..19: mol_type = other RNA
tataattccttccaggacc

SEQ ID NO: 6495 - RNA, 19 nt, synthetic construct
  misc_feature 1..19: note = Description of Artificial Sequence: Synthetic oligonucleotide
  source 1..19: mol_type = other RNA
ttatgtctgacaagaagtt

SEQ ID NO: 6496 - RNA, 19 nt, synthetic construct
  misc_feature 1..19: note = Description of Artificial Sequence: Synthetic oligonucleotide
  source 1..19: mol_type = other RNA
ttttatgtctgacaagaag

SEQ ID NO: 6497 - RNA, 19 nt, synthetic construct
  misc_feature 1..19: note = Description of Artificial Sequence: Synthetic oligonucleotide
  source 1..19: mol_type = other RNA
tatgttacactcctggttg

SEQ ID NO: 6498 - RNA, 19 nt, synthetic construct
  misc_feature 1..19: note = Description of Artificial Sequence: Synthetic oligonucleotide
  source 1..19: mol_type = other RNA
atttatgtctgacaagaag

SEQ ID NO: 6499 - RNA, 19 nt, synthetic construct
  misc_feature 1..19: note = Description of Artificial Sequence: Synthetic oligonucleotide
  source 1..19: mol_type = other RNA
ttttatgtctgacaagaag

SEQ ID NO: 6500 - RNA, 19 nt, synthetic construct
  misc_feature 1..19: note = Description of Artificial Sequence: Synthetic oligonucleotide
  source 1..19: mol_type = other RNA
ttttatgtctgacaagaag

SEQ ID NO: 6501 - RNA, 19 nt, synthetic construct
  misc_feature 1..19: note = Description of Artificial Sequence: Synthetic oligonucleotide
  source 1..19: mol_type = other RNA
ttttatgtctgacaagaag

SEQ ID NO: 6502 - RNA, 19 nt, synthetic construct
  misc_feature 1..19: note = Description of Artificial Sequence: Synthetic oligonucleotide
  source 1..19: mol_type = other RNA
ctttatgtctgacaagaag

SEQ ID NO: 6503 - RNA, 19 nt, synthetic construct
  misc_feature 1..19: note = Description of Artificial Sequence: Synthetic oligonucleotide
  source 1..19: mol_type = other RNA
tataattccttccaggacc

SEQ ID NO: 6504 - RNA, 19 nt, synthetic construct
  misc_feature 1..19: note = Description of Artificial Sequence: Synthetic oligonucleotide
  source 1..19: mol_type = other RNA
tataattccttccaggacc

SEQ ID NO: 6505 - RNA, 19 nt, synthetic construct
  misc_feature 1..19: note = Description of Artificial Sequence: Synthetic oligonucleotide
  source 1..19: mol_type = other RNA
tataattccttccaggacc

SEQ ID NO: 6506 - RNA, 19 nt, synthetic construct
  misc_feature 1..19: note = Description of Artificial Sequence: Synthetic oligonucleotide
  source 1..19: mol_type = other RNA
tataattccttccaggacc

SEQ ID NO: 6507 - RNA, 19 nt, synthetic construct
  misc_feature 1..19: note = Description of Artificial Sequence: Synthetic oligonucleotide
  source 1..19: mol_type = other RNA
tataattccttccaggacc

SEQ ID NO: 6508 - RNA, 19 nt, synthetic construct
  misc_feature 1..19: note = Description of Artificial Sequence: Synthetic oligonucleotide
  source 1..19: mol_type = other RNA
aataattccttccaggacc

SEQ ID NO: 6509 - RNA, 19 nt, synthetic construct
  misc_feature 1..19: note = Description of Artificial Sequence: Synthetic oligonucleotide
  source 1..19: mol_type = other RNA
tattccggcaatagttgtc

SEQ ID NO: 6510 - RNA, 19 nt, synthetic construct
  misc_feature 1..19: note = Description of Artificial Sequence: Synthetic oligonucleotide
  source 1..19: mol_type = other RNA
tacatttaggactgtgtca

SEQ ID NO: 6511 - RNA, 19 nt, synthetic construct
  misc_feature 1..19: note = Description of Artificial Sequence: Synthetic oligonucleotide
  source 1..19: mol_type = other RNA
taaggccacatttaggact

SEQ ID NO: 6512 - RNA, 19 nt, synthetic construct
  misc_feature 1..19: note = Description of Artificial Sequence: Synthetic oligonucleotide
  source 1..19: mol_type = other RNA
tgtgcttgatgttacactc

SEQ ID NO: 6513 - RNA, 19 nt, synthetic construct
  misc_feature 1..19: note = Description of Artificial Sequence: Synthetic oligonucleotide
  source 1..19: mol_type = other RNA
tcggtgcttgatgttacac

SEQ ID NO: 6514 - RNA, 19 nt, synthetic construct
  misc_feature 1..19: note = Description of Artificial Sequence: Synthetic oligonucleotide
  source 1..19: mol_type = other RNA
ttcggttggggattataat

SEQ ID NO: 6515 - RNA, 19 nt, synthetic construct
  misc_feature 1..19: note = Description of Artificial Sequence: Synthetic oligonucleotide
  source 1..19: mol_type = other RNA
tactcggttggggattata

SEQ ID NO: 6516 - RNA, 19 nt, synthetic construct
  misc_feature 1..19: note = Description of Artificial Sequence: Synthetic oligonucleotide
  source 1..19: mol_type = other RNA
tgctttatgtctgacaaga

SEQ ID NO: 6517 - RNA, 19 nt, synthetic construct
  misc_feature 1..19: note = Description of Artificial Sequence: Synthetic oligonucleotide
  source 1..19: mol_type = other RNA
ttggctttatgtctgacaa

SEQ ID NO: 6518 - RNA, 19 nt, synthetic construct
  misc_feature 1..19: note = Description of Artificial Sequence: Synthetic oligonucleotide
  source 1..19: mol_type = other RNA
tttatgtctgacaagaagt

SEQ ID NO: 6519 - RNA, 19 nt, synthetic construct
  misc_feature 1..19: note = Description of Artificial Sequence: Synthetic oligonucleotide
  source 1..19: mol_type = other RNA
tttatgtctgacaagaagt

SEQ ID NO: 6520 - RNA, 19 nt, synthetic construct
  misc_feature 1..19: note = Description of Artificial Sequence: Synthetic oligonucleotide
  source 1..19: mol_type = other RNA
tttatgtctgacaagaagt

SEQ ID NO: 6521 - RNA, 19 nt, synthetic construct
  misc_feature 1..19: note = Description of Artificial Sequence: Synthetic oligonucleotide
  source 1..19: mol_type = other RNA
attatgtctgacaagaagt

SEQ ID NO: 6522 - RNA, 19 nt, synthetic construct
  misc_feature 1..19: note = Description of Artificial Sequence: Synthetic oligonucleotide
  source 1..19: mol_type = other RNA
tttatgtctgacaagaagt

SEQ ID NO: 6523 - RNA, 19 nt, synthetic construct
  misc_feature 1..19: note = Description of Artificial Sequence: Synthetic oligonucleotide
  source 1..19: mol_type = other RNA
tttatgtctgacaagaagt

SEQ ID NO: 6524 - RNA, 19 nt, synthetic construct
  misc_feature 1..19: note = Description of Artificial Sequence: Synthetic oligonucleotide
  source 1..19: mol_type = other RNA
tttatgtctgacaagaagt

SEQ ID NO: 6525 - RNA, 19 nt, synthetic construct
  misc_feature 1..19: note = Description of Artificial Sequence: Synthetic oligonucleotide
  source 1..19: mol_type = other RNA
tttatgtctgacaagaagt

SEQ ID NO: 6526 - RNA, 19 nt, synthetic construct
  misc_feature 1..19: note = Description of Artificial Sequence: Synthetic oligonucleotide
  source 1..19: mol_type = other RNA
tgctttatgtctgacaaga

SEQ ID NO: 6527 - RNA, 19 nt, synthetic construct
  misc_feature 1..19: note = Description of Artificial Sequence: Synthetic oligonucleotide
  source 1..19: mol_type = other RNA
tgctttatgtctgacaaga

SEQ ID NO: 6528 - RNA, 19 nt, synthetic construct
  misc_feature 1..19: note = Description of Artificial Sequence: Synthetic oligonucleotide
  source 1..19: mol_type = other RNA
tgctttatgtctgacaaga

SEQ ID NO: 6529 - RNA, 19 nt, synthetic construct
  misc_feature 1..19: note = Description of Artificial Sequence: Synthetic oligonucleotide
  source 1..19: mol_type = other RNA
tgctttatgtctgacaaga

SEQ ID NO: 6530 - RNA, 19 nt, synthetic construct
  misc_feature 1..19: note = Description of Artificial Sequence: Synthetic oligonucleotide
  source 1..19: mol_type = other RNA
ttggctttatgtctgacaa

SEQ ID NO: 6531 - RNA, 19 nt, synthetic construct
  misc_feature 1..19: note = Description of Artificial Sequence: Synthetic oligonucleotide
  source 1..19: mol_type = other RNA
ttggctttatgtctgacaa

SEQ ID NO: 6532 - RNA, 19 nt, synthetic construct
  misc_feature 1..19: note = Description of Artificial Sequence: Synthetic oligonucleotide
  source 1..19: mol_type = other RNA
ttggctttatgtctgacaa

SEQ ID NO: 6533 - RNA, 19 nt, synthetic construct
  misc_feature 1..19: note = Description of Artificial Sequence: Synthetic oligonucleotide
  source 1..19: mol_type = other RNA
ttggctttatgtctgacaa

SEQ ID NO: 6534 - RNA, 19 nt, synthetic construct
  misc_feature 1..19: note = Description of Artificial Sequence: Synthetic oligonucleotide
  source 1..19: mol_type = other RNA
ttggctttatgtctgacaa

SEQ ID NO: 6535 - RNA, 19 nt, synthetic construct
  misc_feature 1..19: note = Description of Artificial Sequence: Synthetic oligonucleotide
  source 1..19: mol_type = other RNA
ttggctttatgtctgacaa

1. A composition for modulating an expression of MST1, the composition comprising a oligonucleotide comprising an siRNA comprising a sense strand and an antisense strand, each strand is independently 12-30 nucleosides in length, and at least one of the sense strand and the antisense strand comprises a nucleoside sequence comprising 12-30 contiguous nucleosides of a sequence of Table 33B or Table 33C.

2. The composition of claim 1, wherein the oligonucleotide comprises at least one modified nucleoside.

3. The composition of claim 2, wherein the oligonucleotide comprises 1, 2, 3, 4, 5, 6, 7, 8, 9, 10, 11, 12, 13, 14, 15, 16, 17, 18, 19, 20, or 21 modified nucleosides.

4. The composition of claim 2, wherein the at least one modified nucleoside comprises a locked nucleic acid (LNA), hexitol nucleic acid (HNA), cyclohexene nucleic acid (CeNA), 2′-O-methoxyethyl, 2′-O-alkyl, 2′-O-allyl, 2′-fluoro, 2′-deoxy, a 2′-O-methyl nucleoside, 2′-deoxyfluoro nucleoside, 2′-O—N-methylacetamido (2′-O-NMA) nucleoside, a 2′-O-dimethylaminoethoxyethyl (2′-O-DMAEOE) nucleoside, 2′-O-aminopropyl (2′-O-AP) nucleoside, or 2′-ara-F, or a combination thereof.

5. The composition of claim 4, wherein the at least one modified nucleoside comprises a 2′-fluoro modified nucleoside or a 2′-O-alkyl modified nucleoside.

6. The composition of claim 1, wherein any one of the following is true with regard to the sense strand:
all purines comprise 2′-fluoro modified purines, and all pyrimidines comprise a mixture of 2′-fluoro and 2′-O-methyl modified pyrimidines;
all purines comprise 2′-O-methyl modified purines, and all pyrimidines comprise a mixture of 2′-fluoro and 2′-O-methyl modified pyrimidines;
all purines comprise 2′-fluoro modified purines, and all pyrimidines comprise 2′-O-methyl modified pyrimidines;
all pyrimidines comprise 2′-fluoro modified pyrimidines, and all purines comprise a mixture of 2′-fluoro and 2′-O-methyl modified purines;
all pyrimidines comprise 2′-O-methyl modified pyrimidines, and all purines comprise a mixture of 2′-fluoro and 2′-O-methyl modified purines; or
all pyrimidines comprise 2′-fluoro modified pyrimidines, and all purines comprise 2′-O-methyl modified purines.

7. The composition of claim 1, wherein any one of the following is true with regard to the antisense strand:
all purines comprise 2′-fluoro modified purines, and all pyrimidines comprise a mixture of 2′-fluoro and 2′-O-methyl modified pyrimidines;
all purines comprise 2′-O-methyl modified purines, and all pyrimidines comprise a mixture of 2′-fluoro and 2′-O-methyl modified pyrimidines;
all purines comprise 2′-O-methyl modified purines, and all pyrimidines comprise 2′ fluoro modified pyrimidines;
all pyrimidines comprise 2′-fluoro modified pyrimidines, and all purines comprise a mixture of 2′-fluoro and 2′-O-methyl modified purines;
all pyrimidines comprise 2′-O-methyl modified pyrimidines, and all purines comprise a mixture of 2′-fluoro and 2′-O-methyl modified purines;
all pyrimidines comprise 2′-O-methyl modified pyrimidines, and all purines comprise 2′-fluoro modified purines; or
all pyrimidines comprise a mixture of 2′-fluoro and 2′-O-methyl modified purines, and
all purines comprise a mixture of 2′-fluoro and 2′-O-methyl modified purines.

8. The composition of claim 1, wherein the oligonucleotide comprises at least one modified internucleoside linkage.

9. The composition of claim 8, wherein the oligonucleotide comprises 1, 2, 3, 4, 5, 6, 7, 8, 9, 10, 11, 12, 13, 14, 15, 16, 17, 18, 19, or 20 modified internucleoside linkages.

10. The composition of claim 8, wherein the modified internucleoside linkage comprises alkylphosphonate, phosphorothioate, methylphosphonate, phosphorodithioate, alkylphosphonothioate, phosphoramidate, carbamate, carbonate, phosphate triester, acetamidate, or carboxymethyl ester, or a combination thereof.

11. The composition of claim 10, wherein the modified internucleoside linkage comprises one or more phosphorothioate linkages.

12. The composition of claim 1, wherein the oligonucleotide comprises a lipid, a sugar moiety or an integrin targeting ligand attached at a 3′ or 5′ terminus of the oligonucleotide.

13. The composition of claim 12, wherein the sugar moiety comprises N-acetylgalactosamine (GalNAc), N-acetylglucosamine (GlcNAc), or mannose.

14. The composition of claim 1, wherein the sense strand comprises an oligonucleotide sequence of SEQ ID NO: 2999 or 6385; and the antisense strand comprises an oligonucleotide sequence of SEQ ID NO: 6023 or 6415.

15. The composition of claim 14, wherein
(a) the sense strand comprises modification pattern 30S (SEQ ID NO: 6340);
(b) the antisense strand comprises modification pattern 15AS (SEQ ID NO: 6351); or
(c) both (a) and (b).

16. The composition of claim 1, wherein the oligonucleotide comprises an overhang at the 3′ end of the sense strand, the 3′ end of the antisense strand, or the 3′ ends of both the sense and antisense strands.

17. The composition of claim 16, wherein the overhang comprises at least one modified or unmodified uracil.

18. The composition of claim 16, wherein the overhang comprises one or more nucleotides connected via a phosphorothioate linkage.

19. The composition of claim 1, wherein the composition further comprises a pharmaceutically acceptable carrier.

20. A composition for modulating an expression of MST1, the composition comprising a modified oligonucleotide comprising an siRNA comprising a sense strand and an antisense strand, each strand is independently 12-30 nucleosides in length, at least one of the sense strand and the antisense strand comprises a nucleoside sequence comprising 12-30 contiguous nucleosides of SEQ ID NO: 6185; and
(a) the sense strand comprises modification pattern 1S, 2S, 3S, 4S, 5S, 6S, 7S, 8S, 9S, 10S, 11S, 12S, 13S, 14S, 15S, 16S, 17S, 18S, 19S, 20S, 21S, 22S, 23S, 24S, 25S, 26S, 27S, 28S, 29S, 30S, 31S, 32S, 33S, 34S, or 35S;
(b) the antisense strand comprises modification pattern 1AS, 2AS, 3AS, 4AS, 5AS, 6AS, 7AS, 8AS, 9AS, 10AS, 11AS, 12AS, 13AS, 14AS, 15AS, 16AS, 17AS, 18AS, 19AS, 20AS, or 21AS; or
(c) both (a) and (b).

21. The composition of claim 20, wherein
(a) the sense strand comprises modification pattern 30S (SEQ ID NO: 6340);
(b) the antisense strand comprises modification pattern 15AS (SEQ ID NO: 6351); or
(c) both (a) and (b).

22. The composition of claim 20, wherein the sense strand comprises an oligonucleotide sequence of SEQ ID NO: 2999 or SEQ ID NO: 6385.

23. The composition of claim 20, wherein the antisense strand comprises an oligonucleotide sequence of SEQ ID NO: 6023 or SEQ ID NO: 6415.

24. A method of treating a subject having a lung disorder, the method comprising administering an effective amount of a composition comprising an oligonucleotide that modulates an expression of MST1 to a subject,
wherein the oligonucleotide comprises a siRNA comprising a sense strand and an antisense strand, each strand is independently 12-30 nucleosides in length, and at least one of the sense strand and the antisense strand comprises a nucleoside sequence comprising 12-30 contiguous nucleosides of SEQ ID NO: 6185.

25. The method of claim 24, wherein the lung disorder comprises at least one of COPD, acute exacerbation of COPD, emphysema, chronic bronchitis, asthma, status asthmaticus, asthma-COPD overlap syndrome (ACOS), bronchiectasis, cough, dyspnea, mucus hypersecretion, lung cancer, interstitial lung disease, or pulmonary fibrosis.

26. A method of improving a lung disorder measurement in a subject comprising administering an effective amount of a composition comprising an oligonucleotide such that administration results in improvement of one or more of:
(a) a lung function measurement;
(b) a leukocyte measurement;
(c) a chronic obstructive pulmonary disease (COPD) symptom or exacerbation measurement;
(d) an asthma symptom or exacerbation measurement; or
(e) a combination thereof.

27. The method of claim 26, wherein the lung function measurement comprises a forced expiratory volume in 1 second (FEV1) measurement, a forced expiratory volume in 1 second percent predicted (FEV1pp) measurement, a forced vital capacity (FVC) measurement, a FEV1/FVC ratio measurement, a forced expiratory volume, or a peak expiratory flow measurement.

28. The method of claim 26, wherein the leukocyte measurement comprises a lung leukocyte measurement or a circulating leukocyte measurement.

29. The method of claim 26, wherein the leukocyte measurement comprises a neutrophil measurement, an eosinophil measurement, a basophil measurement, a monocyte measurement, a lymphocyte measurement, a macrophage measurement, or a neutrophil lymphocyte ratio measurement or a combination thereof.

30. The method of claim 26, wherein the lung function measurement, the leukocyte measurement, the chronic obstructive pulmonary disease (COPD) symptom or exacerbation measurement, or the asthma symptom or exacerbation measurement is improved by about 10% or more, as compared to prior to administration.
